(19) United States
(12) Patent Application Publication
(10) Pub. No.: US 2024/0238412 A1
(43) Pub. Date: Jul. 18, 2024

(54) PANCORONAVIRUS VACCINES

(71) Applicant: Gritstone bio, Inc., Emeryville, CA (US)

(72) Inventors: Leonid Gitlin, Foster City, CA (US); Karin Jooss, San Diego, CA (US); Sue-Jean Hong, Emeryville, CA (US); Ciaran Daniel Scallan, San Francisco, CA (US); Amy Rachel Rappaport, Daly City, CA (US); Christine Denise Palmer, Cambridge, MA (US); Minh Duc Cao, Belmont, MA (US); Joshua Klein, Brookline, MA (US)

(21) Appl. No.: 18/622,497

(22) Filed: Mar. 29, 2024

Related U.S. Application Data
(63) Continuation of application No. PCT/US2022/077488, filed on Oct. 3, 2022.
(60) Provisional application No. 63/374,664, filed on Sep. 6, 2022.
(60) Provisional application No. 63/251,441, filed on Oct. 1, 2021.

(51) Int. Cl. A61K 39/215; A61K 39/00; A61P 37/04; C12N 15/86

(52) U.S. Cl. CPC A61K 39/215; A61P 37/04; C12N 15/86; A61K 2039/5256; C12N 2770/20022; C12N 2770/20034; C12N 2770/36143; C12N 2830/50

(57) ABSTRACT

Disclosed herein are vaccine compositions that include Pancorona receptor binding domain (RBD) encoding cassettes and/or MHC epitope-encoding cassettes. Also disclosed are nucleotides, cells, and methods associated with the compositions including their use as vaccines.

### CROSS REFERENCE TO RELATED APPLICATIONS

[0001] This application is a Continuation of International Patent Application No. PCT/US2022/077488, filed Oct. 3, 2022, which claims the benefit of U.S. Provisional Application No. 63/251,441 filed Oct. 1, 2021 and U.S. Provisional Application No. 63/374,664 filed Sep. 6, 2022, each of which is hereby incorporated in their entirety by reference for all purposes.

### SEQUENCE LISTING

[0002] The instant application contains a Sequence Listing which has been submitted electronically in .XML format and is hereby incorporated by reference in its entirety. Said XML copy, created on 17 Feb. 2023, is named GSO-102WO and is 5,884,562 bytes in size.

### BACKGROUND

[0003] Severe acute respiratory syndrome corona virus 2 (SARS-COV-2) is the virus strain responsible for the Coronavirus Disease 2019 (Covid-19) pandemic. As of Dec. 21, 2021, the virus has infected over 275 million people and caused about 5.4 million deaths worldwide. A CD8+ T cell response may be important for COVID-19 for two reasons in a coronavirus context. First is the recurrent observation in pre-clinical models that SARS vaccines that only stimulate antibody responses are often associated with pulmonary inflammation, independent of viral clearance. This has been observed in both rodents and non-human primates (NHP), and the current consensus is that it is caused by an imbalanced immune response, and is likely to be solved by using vaccines that drive a balanced antibody and CD8+ T cell (Th1) response (Consensus considerations on the assessment of the risk of disease enhancement with COVID-19 vaccines: Outcome of a Coalition for Epidemic Preparedness Innovations (CEPI)/Brighton Collaboration (BC) scientific working meeting, Mar. 12-13, 2020). Secondly, coronaviruses are evidently mutating frequently and crossing from animal reservoirs into humans, with three epidemics/pandemics over the last 18 years (SARS in 2002, MERS in 2012, now COVID-19). Antibody responses are often against highly mutable proteins (such as the Spike protein of SARS-COV-2) which change significantly between strains and isolates, whereas T cell epitopes often derive from more evolutionarily conserved proteins. T cell memory is also generally more durable than B cell memory and thus CD8+T memory against SARS-COV-2 may provide longer, and better protection against future SARS variants. Many vaccines have demonstrated an ability to drive antibody responses in NHP and humans, but commonly used modalities such as protein/peptide and mRNA vaccines have not stimulated meaningful CD8+ T cell responses in these species.

[0004] An additional question for antigen vaccine design in infectious disease settings is which of the many proteins present generate the “best” therapeutic antigens, e.g., antigens that can stimulate immunity.

[0005] In addition to the challenges of current antigen prediction methods certain challenges also exist with the available vector systems that can be used for antigen delivery in humans, many of which are derived from humans. For example, many humans have pre-existing immunity to human viruses as a result of previous natural exposure, and this immunity can be a major obstacle to the use of recombinant human viruses for antigen delivery in vaccination strategies, such as in cancer treatment or vaccinations against infectious diseases.

[0006] While some progress has been made in vaccinations strategies addressing the above problems, improvements are still needed, particularly for clinical applications, such as improved vaccine potency and efficacy, such as the need for a pan-Coronavirus vaccine that stimulates balanced B and T cell immunity in humans against current and potential future Coronavirus.

### SUMMARY

[0007] Provided for herein is a composition for delivery of an antigen expression system, comprising: the antigen expression system, wherein the antigen expression system comprises at least two distinct coronavirus receptor binding domain (RBD) derived nucleic acid sequences encoding at least two distinct RBD domains, respectively, and wherein the at least two distinct RBD domains are collectively at least 70% identical by amino acid composition to RBD domains from at least two of a clade 1 Sarbecovirus, a clade 2 Sarbecovirus, or a clade 3 Sarbecovirus.

[0008] Also provided herein is a composition for delivery of an antigen expression system, comprising: the antigen expression system, wherein the antigen expression system comprises: (a) a vector comprising: a vector backbone, wherein the vector backbone comprises: (i) at least one promoter nucleotide sequence, and (ii) at least one polyadenylation (poly(A)) sequence; and (b) an antigen cassette, wherein the antigen cassette is inserted into the vector backbone such that the antigen cassette is operably linked to the at least one promoter nucleotide sequence, and wherein the antigen cassette comprises at least two distinct coronavirus receptor binding domain (RBD) derived nucleic acid sequences encoding at least two distinct RBD domains, respectively, and wherein the at least two distinct RBD domains are collectively at least 70% identical by amino acid composition to RBD domains from at least two of a clade 1 Sarbecovirus, a clade 2 Sarbecovirus, or a clade 3 Sarbecovirus.

[0009] In some aspects, the at least two distinct RBD domains are collectively at least 70% identical by amino acid composition to RBD domains from each of: (A) the clade 3 Sarbecovirus; and (B) the clade 1 Sarbecovirus and/or the clade 2 Sarbecovirus. In some aspects, the at least two distinct RBD domains are collectively at least 80% identical by amino acid composition to RBD domains from each of the clade 1 Sarbecovirus and the clade 2 Sarbecovirus. In some aspects, the at least two distinct RBD domains are collectively at least 85% identical by amino acid composition to RBD domains from each of the clade 1 Sarbecovirus and the clade 2 Sarbecovirus. In some aspects, the at least two distinct RBD domains are collectively at least 90% identical by amino acid composition to RBD domains from each of the clade 1 Sarbecovirus and the clade 2 Sarbecovirus.

[0010] In some aspects, the at least two distinct RBD domains are collectively at least 70% identical by amino acid composition to RBD domains from each of NC_045512.2, NC_004718.3, MT121216.1, DQ648857.1, GQ153542.1, DQ648856.1, AY278489.2, GQ153540.1, MN996532.2, KJ473811.1, NC_014470.1, KC881005.1, MK211377.1, KJ473816.1, MK211376.1, AY572034.1, KP886809.1, MT072864.1, KF569996.1, JX993987.1, MK211378.1, MK211374.1, KJ473815.1, JX993988.1, DQ071615.1, KT444582.1, MZ206298.1, and KJ473814.1.

[0011] In some aspects, the antigen expression system comprises at least three distinct coronavirus RBD derived nucleic acid sequences encoding at least three distinct RBD domain. In some aspects, the at least three distinct RBD domains are collectively at least 70% identical by amino acid composition to RBD domains from each of the clade 1 Sarbecovirus, the clade 2 Sarbecovirus, and the clade 3 Sarbecovirus. In some aspects, the at least three distinct RBD domains are collectively at least 70% identical by amino acid composition to RBD domains from each of NC_045512.2, NC_004718.3, MT121216.1, DQ648857.1, GQ153542.1, DQ648856.1, AY278489.2, GQ153540.1, MN996532.2, KJ473811.1, NC_014470.1, KC881005.1, MK211377.1, KJ473816.1, MK211376.1, AY572034.1, KP886809.1, MT072864.1, KF569996.1, JX993987.1, MK211378.1, MK211374.1, KJ473815.1, JX993988.1, DQ071615.1, KT444582.1, MZ206298.1, KJ473814.1, and SARS-COV-2.

[0012] In some aspects, the antigen expression system comprises at least four distinct coronavirus RBD derived nucleic acid sequences encoding at least four distinct RBD domain. In some aspects, the at least four distinct RBD domains are collectively at least 70% identical by amino acid composition to RBD domains from each of the clade 1 Sarbecovirus, the clade 2 Sarbecovirus, and the clade 3 Sarbecovirus. In some aspects, the at least four distinct RBD domains are collectively at least 70% identical by amino acid composition to RBD domains from each of NC_045512.2, NC_004718.3, MT121216.1, DQ648857.1, GQ153542.1, DQ648856.1, AY278489.2, GQ153540.1, MN996532.2, KJ473811.1, NC_014470.1, KC881005.1, MK211377.1, KJ473816.1, MK211376.1, AY572034.1, KP886809.1, MT072864.1, KF569996.1, JX993987.1, MK211378.1, MK211374.1, KJ473815.1, JX993988.1, DQ071615.1, KT444582.1, MZ206298.1, KJ473814.1, and SARS-COV2.

[0013] In some aspects, each of the sarbecovirus RBD derived nucleic acid sequences are independently derived from RBD nucleic acid sequences of sarbecovirus sequences selected from the group consisting of: KP886809, KJ473815, MK211376, DQ648856, GQ153542, NC_004718, JX993988, and SARS-COV2. In some aspects, each of the sarbecovirus RBD derived nucleic acid sequences are independently derived from RBD nucleic acid sequences of sarbecovirus sequences from each of KP886809, KJ473815, MK211376, and SARS-COV2. In some aspects, each of the sarbecovirus RBD derived nucleic acid sequences are independently derived from RBD nucleic acid sequences of sarbecovirus sequences from each of KJ473815, MK211376, DQ648856, and SARS-COV2. In some aspects, each of the sarbecovirus RBD derived nucleic acid sequences are independently derived from RBD nucleic acid sequences of sarbecovirus sequences from each of GQ153542, NC_004718, JX993988, and SARS-COV2.

[0014] In some aspects, the at least two distinct RBD domains encode full-length RBD domains that are collectively at least 70% identical by amino acid composition to full-length RBD domains from at least two of the clade 1 Sarbecovirus, the clade 2 Sarbecovirus, or the clade 3 Sarbecovirus. In some aspects, the at least two distinct RBD domains encode full-length RBD domains that are collectively at least 70% identical by amino acid composition to full-length RBD domains from at least two of the clade 1 Sarbecovirus, the clade 2 Sarbecovirus, or the clade 3 Sarbecovirus. In some aspects, the at least two distinct coronavirus RBD derived nucleic acid sequences comprise at least a betacoronavirus RBD derived nucleic acid sequence.

[0015] In some aspects, the at least two distinct coronavirus RBD derived nucleic acid sequences each comprise a betacoronavirus RBD derived nucleic acid sequences. In some aspects, the at least two distinct coronavirus RBD derived nucleic acid sequences are selected from the group consisting of: a betacoronavirus RBD derived nucleic acid sequence, an alphacoronavirus RBD derived nucleic acid sequence, and combinations thereof.

[0016] In some aspects, each of the distinct RBD domains comprises a distinct receptor-binding motif (RBM) domain, respectively, and wherein the distinct RBM domains are collectively at least 30% identical by amino acid composition to RBM domains from at least two of a clade 1 Sarbecovirus, a clade 2 Sarbecovirus, or a clade 3 Sarbecovirus.

[0017] In some aspects, the amino acid sequences of the at least two distinct RBD domains other than the amino acid sequences of their respective RBM domains are collectively at least 70% identical by amino acid composition to the amino acid sequences of RBD domains sequences other than the amino acid sequences of an RBM from at least two of a clade 1 Sarbecovirus, a clade 2 Sarbecovirus, or a clade 3 Sarbecovirus.

[0018] Also provided herein is a composition for delivery of an antigen expression system, comprising: the antigen expression system, wherein the antigen expression system comprises at least two distinct coronavirus receptor binding domain (RBD) derived nucleic acid sequences encoding at least two distinct RBD domains, respectively, and wherein the at least two distinct RBD domains are at least 70% identical by amino acid composition to RBD domains from at least two of a sarbecovirus RBD derived nucleic acid sequence, a merbecoviorus RBD derived nucleic acid sequence, an embecovirus RBD derived nucleic acid sequence, and combinations thereof.

[0019] In some aspects, the at least two distinct RBD domains comprises between 2-4, between 2-5, between 2-6, between 2-7, between 2-8, between 2-9, between 2-10, between 2-11, between 2-12, between 2-13, between 2-14, between 2-15, between 2-16, between 2-17, between 2-18, between 2-19, or between 2-20 distinct RBD domains. In some aspects, the at least two distinct RBD domains comprises between 3-8, between 4-8, between 3-8, between 4-8, between 3-9, between 4-9, between 3-10, or between 4-10 distinct RBD domains.

[0020] In some aspects, the at least two distinct coronavirus RBD derived nucleic acid sequences are encoded by a single polynucleotide sequence. In some aspects, the at least two distinct coronavirus RBD derived nucleic acid sequences are encoded by a single antigen cassette. In some aspects, the at least two distinct coronavirus RBD derived nucleic acid sequences are each encoded by separate polynucleotide sequences. In some aspects, the at least two distinct coronavirus RBD derived nucleic acid sequences are each encoded by separate antigen cassettes. In some aspects, the separate antigen cassettes are each encoded by separate vectors.

[0021] In some aspects, each of the at least two distinct coronavirus RBD derived nucleic acid sequences further comprises a distinct trimerization domain derived nucleic acid sequence. In some aspects, each of the at least two distinct coronavirus RBD derived nucleic acid sequences comprises the same RBD trimerization domain derived nucleic acid sequence. In some aspects, the RBD trimerization domain is selected from the group consisting of: a T4 trimerization domain, a MTQ trimerization domain; a GCN4 trimerization domain, and combinations thereof. In some aspects, each of the at least two distinct coronavirus RBD derived nucleic acid sequences comprises a T4 trimerization domain derived nucleic acid sequence. In some aspects, the at least two distinct coronavirus RBD derived nucleic acid sequences comprises each independently comprise a T4 trimerization domain, a MTQ trimerization domain; a GCN4 trimerization domain.

[0022] In some aspects, the coronavirus RBD derived nucleic acid sequence encodes a full-length RBD domain. In some aspects, the coronavirus RBD derived nucleic acid sequence encodes a RBD domain (a) lacking a receptor-binding motif (RBM) domain, (b) comprising an RBM domain that is not derived from the coronavirus the remainder of the RBD is derived from, or (c) comprising RBD sequences that are not derived from the coronavirus the RBM domain is derived from. In some aspects, the coronavirus RBD derived nucleic acid sequence encodes only an RBM domain of the corresponding RBD domain. In some aspects, the at least two distinct coronavirus RBD derived nucleic acid sequences are linked directly to one another. In some aspects, the at least two distinct coronavirus RBD derived nucleic acid sequences are concatenated such that the sequences are capable of being expressed as a single mRNA. In some aspects, the at least two distinct coronavirus RBD derived nucleic acid sequences are linked together with a peptide-linker encoding nucleic acid sequence. In some aspects, the peptide-linker encoding nucleic acid sequence encodes a 2A ribosome skipping sequence element, optionally selected from the group consisting of: a E2A ribosome skipping sequence element, a P2A ribosome skipping sequence element, a F2A ribosome skipping sequence element, a T2A sequence ribosome skipping sequence element, and combinations thereof. In some aspects, the peptide-linker encoding nucleic acid sequence encodes a cleavable peptide linker, optionally selected from: a TEV cleavage site, a furin cleavage site, and combinations thereof. In some aspects, the peptide-linker encoding nucleic acid sequence encodes a T2A sequence ribosome skipping sequence element and a furin cleavage site.

[0023] In some aspects, each of the at least two distinct coronavirus RBD derived nucleic acid sequences further comprises a signal-peptide encoding nucleic acid sequence. In some aspects, the signal-peptide comprises a coronavirus derived signal-peptide. In some aspects, the signal-peptide comprises a SARS-COV-2 derived signal-peptide.

[0024] In some aspects, one or more of the at least two distinct coronavirus RBD derived nucleic acid sequences are sequence optimized.

[0025] In some aspects, the at least two distinct coronavirus RBD derived nucleic acid sequences are operably linked to a promoter. In some aspects, the at least two distinct coronavirus RBD derived nucleic acid sequences are operably linked to a single promoter. In some aspects, each of the at least two distinct coronavirus RBD derived nucleic acid sequences are operably linked to a separate promoter. In some aspects, the promoter comprises a subgenomic promoter sequence, optionally wherein the subgenomic promoter sequence comprises an alphavirus derived subgenomic promoter sequence.

[0026] In some aspects, each of the at least two distinct coronavirus RBD derived nucleic acid sequences each separately encodes a peptide of the following format: signal peptide-RBD-trimerization domain. In some aspects, the at least two distinct coronavirus RBD derived nucleic acid sequences encodes a concatenated peptide of the following format: signal peptide-first RBD-first trimerization domain-signal peptide-second RBD-second trimerization domain-signal peptide-third RBD-third trimerization domain. In some aspects, the at least two distinct coronavirus RBD derived nucleic acid sequences encodes a concatenated peptide of the following format: signal peptide-first RBD-first trimerization domain-T2A-Furin-signal peptide-second RBD-second trimerization domain-T2A-Furin-signal peptide-third RBD-third trimerization domain.

[0027] In some aspects, at least one of the at least two distinct RBD domains comprises a SARS-COV-2 SPIKE protein. In some aspects, the SARS-COV-2 SPIKE protein is encoded by a SARS-COV-2 SPIKE derived nucleic acid sequence comprising: a) a SARS-COV-2 Spike protein comprising a Spike polypeptide sequence as set forth in SEQ ID NO:59 or an epitope-containing fragment thereof, optionally wherein the Spike polypeptide comprises a D614G mutation with reference to SEQ ID NO:59, and optionally wherein the Spike polypeptide is encoded by the nucleotide sequence shown in SEQ ID NO:79, SEQ ID NO:83, SEQ ID NO:85, or SEQ ID NO:87; or b) a SARS-COV-2 modified Spike protein comprising a mutation selected from the group consisting of: a Spike R682 mutation, a Spike R815 mutation, a Spike K986P mutation, a Spike V987P mutation, and combinations thereof with reference to the Spike polypeptide sequence as set forth in SEQ ID NO:59, and optionally wherein the modified Spike protein comprises a polypeptide sequence as set forth in SEQ ID NO:60 or SEQ ID NO:90 or an epitope-containing fragment thereof.

[0028] In some aspects, the antigen expression system comprises at least one coronavirus derived nucleic acid sequence encoding an immunogenic polypeptide distinct from the at least two distinct RBD domains. In some aspects, the at least one coronavirus derived nucleic acid sequence comprises a beta coronavirus derived nucleic acid sequence.

[0029] In some aspects, the antigen expression system comprises at least one SARS-COV-2 derived nucleic acid sequence encoding an immunogenic polypeptide. In some aspects, the antigen cassette comprises at least one SARS-COV-2 derived nucleic acid sequence encoding an immunogenic polypeptide. In some aspects, the at least one SARS-COV-2 derived nucleic acid sequence comprises a SARS-COV-2 SPIKE derived nucleic acid sequence. In some aspects, the SARS-COV-2 SPIKE derived nucleic acid sequence comprises: a) a SARS-COV-2 Spike protein comprising a Spike polypeptide sequence as set forth in SEQ ID NO:59 or an epitope-containing fragment thereof, optionally wherein the Spike polypeptide comprises a D614G mutation with reference to SEQ ID NO:59, and optionally wherein the Spike polypeptide is encoded by the nucleotide sequence shown in SEQ ID NO:79, SEQ ID NO:83, SEQ ID NO:85, or SEQ ID NO:87; or b) a SARS-COV-2 modified Spike protein comprising a mutation selected from the group consisting of: a Spike R682 mutation, a Spike R815 mutation, a Spike K986P mutation, a Spike V987P mutation, and combinations thereof with reference to the Spike polypeptide sequence as set forth in SEQ ID NO:59, and optionally wherein the modified Spike protein comprises a polypeptide sequence as set forth in SEQ ID NO:60 or SEQ ID NO:90 or an epitope-containing fragment thereof.

[0030] In some aspects, the at least one coronavirus derived nucleic acid sequence and/or SARS-COV-2 derived nucleic acid sequence comprises an MHC class I epitope encoding sequence. In some aspects, the at least one coronavirus derived nucleic acid sequence, SARS-CoV-2 derived nucleic acid sequence, and/or MHC class I epitope encoding sequence comprises:
[0031] at least one MHC class I epitope comprising a polypeptide sequence as set forth in Table A,
[0032] at least one MHC class II epitope comprising a polypeptide sequence as set forth in Table B,
[0033] at least one MHC class I epitope comprising a polypeptide sequence as set forth in Table C, optionally wherein the at least one MHC I epitope is present in a concatenated polypeptide sequence as set forth in SEQ ID NO:57 or SEQ ID NO:58,
[0034] at least one polypeptide sequence as set forth in Table 7, or an epitope-containing fragment thereof, optionally wherein the at least one polypeptide sequence is present in a concatenated polypeptide sequence as set forth in SEQ ID NO:92,
[0035] at least one polypeptide sequence as set forth in Table 9A, Table 9B, or Table 9C, or an epitope-containing fragment thereof, optionally wherein the at least one polypeptide sequence is present in a concatenated polypeptide comprising each of the sequences set forth in Table 9A, Table 9B, or Table 9C, optionally wherein the concatenated polypeptide comprises the order of sequences set forth in Table 9A, Table 9B, or Table 9C,
[0036] at least one MHC class I epitope comprising a polypeptide sequence as set forth in Table A and/or Table C or MHC class II epitope comprising a polypeptide sequence as set forth in Table B, wherein the encoded SARS-COV-2 immunogenic polypeptide is conserved between SARS-COV-2 and a Coronavirus species and/or sub-species other than SARS-COV-2, optionally wherein the Coronavirus species and/or sub-species other than SARS-COV-2 is Severe acute respiratory syndrome (SARS) and/or Middle East respiratory syndrome (MERS),
[0037] one or more validated epitopes and/or at least 4, 5, 6, or 7 predicted epitopes, wherein at least 85%, 90%, or 95% of a population carries at least one HLA validated to present at least one of the one or more validated epitopes and/or at least one HLA predicted to present each of the at least 4, 5, 6, or 7 predicted epitopes,
[0038] a SARS-COV-2 Spike protein comprising a Spike polypeptide sequence as set forth in SEQ ID NO:59 or an epitope-containing fragment thereof, optionally wherein the Spike polypeptide comprises a D614G mutation with reference to SEQ ID NO:59, and optionally wherein the Spike polypeptide is encoded by the nucleotide sequence shown in SEQ ID NO:79, SEQ ID NO:83, SEQ ID NO:85, or SEQ ID NO:87,
[0039] a SARS-COV-2 modified Spike protein comprising a mutation selected from the group consisting of: a Spike R682 mutation, a Spike R815 mutation, a Spike K986P mutation, a Spike V987P mutation, and combinations thereof with reference to the Spike polypeptide sequence as set forth in SEQ ID NO:59, and optionally wherein the modified Spike protein comprises a polypeptide sequence as set forth in SEQ ID NO:60 or SEQ ID NO:90 or an epitope-containing fragment thereof,
[0040] a SARS-COV-2 Membrane protein comprising a Membrane polypeptide sequence as set forth in SEQ ID NO:61 or an epitope-containing fragment thereof,
[0041] a SARS-COV-2 Nucleocapsid protein comprising a Nucleocapsid polypeptide sequence as set forth in SEQ ID NO:62 or an epitope-containing fragment thereof,
[0042] a SARS-COV-2 Envelope protein comprising an Envelope polypeptide sequence as set forth in SEQ ID NO:63 or an epitope-containing fragment thereof,
[0043] a variant of any of the above comprising a mutation found in 1% or greater of SARS-CoV-2 subtypes, optionally wherein the variant comprises a SARS-COV-2 variant shown in Table 1, and/or optionally wherein the variant comprises a SARS-COV-2 variant Spike protein comprising a Spike D614G mutation with reference to the Spike polypeptide sequence as set forth in SEQ ID NO:59, a SARS-COV-2 variant Spike protein corresponding to a B.1.351 SARS-COV-2 isolate optionally comprising the Spike polypeptide sequence as set forth in SEQ ID NO: 112, or a SARS-COV-2 variant Spike protein corresponding to a B.1.1.7 SARS-COV-2 isolate optionally comprising the Spike polypeptide sequence as set forth in SEQ ID NO:110,
[0044] at least one polypeptide sequence as set forth in Table 16A, Table 16B, Table 16C, or Table 16D, or an epitope-containing fragment thereof, optionally wherein the at least one polypeptide sequence is present in a concatenated polypeptide comprising each of the sequences set forth in Table 16A, Table 16B, Table 16C, or Table 16D, optionally wherein the concatenated polypeptide comprises the order of sequences set forth in Table 16A, Table 16B, Table 16C, or Table 16D,
[0045] or combinations thereof.

[0046] In some aspects, the MHC class I epitope encoding sequence comprises at least one polypeptide sequence as set forth in Table 16A, Table 16B, Table 16C, or Table 16D, or an epitope-containing fragment thereof, optionally wherein the at least one polypeptide sequence is present in a concatenated polypeptide comprising each of the sequences set forth in Table 16A, Table 16B, Table 16C, or Table 16D, optionally wherein the concatenated polypeptide comprises the order of sequences set forth in Table 16A, Table 16B, Table 16C, or Table 16D.

[0047] In some aspects, the at least one coronavirus derived nucleic acid sequence, SARS-CoV-2 derived nucleic acid sequence, and/or MHC class I epitope encoding sequence is selected from the group consisting of: a Spike protein, a Membrane protein, a Nucleocapsid protein, an Envelope protein, a replicase orf1a and orf1b protein, and combinations thereof.

[0048] In some aspects, the at least one coronavirus derived nucleic acid sequence is encoded on a separate vector distinct from the vector or vectors encoding the at least two distinct coronavirus RBD derived nucleic acid sequences, optionally wherein the encoded immunogenic polypeptide distinct from the at least two distinct coronavirus RBD comprises a MHC class I epitope encoding sequence comprising at least one polypeptide sequence as set forth in Table 16A, Table 16B, Table 16C, or Table 16D, or an epitope-containing fragment thereof, optionally wherein the at least one polypeptide sequence is present in a concatenated polypeptide comprising each of the sequences set forth in Table 16A, Table 16B, Table 16C, or Table 16D, optionally wherein the concatenated polypeptide comprises the order of sequences set forth in Table 16A, Table 16B, Table 16C, or Table 16D

[0049] In some aspects, following administration to a subject, the composition is capable of stimulating an immune response against multiple coronaviruses. In some aspects, following administration to a subject, the composition is capable of stimulating an immune response against at least each of the coronaviruses from which the at least two distinct coronavirus RBD derived nucleic acid sequences were derived. In some aspects, following administration to a subject, the composition is capable of stimulating an immune response against a coronavirus distinct from the coronaviruses from which the at least two distinct coronavirus RBD derived nucleic acid sequences were derived. In some aspects, the composition is capable of stimulating neutralizing antibody production. In some aspects, the composition wherein stimulating neutralizing antibody production comprises a neutralizing antibody titer having an NT50 value calculated as a minimum dilution of sera from the immunized subject that neutralizes a coronavirus by 50%. In some aspects, stimulating neutralizing antibody production comprises a minimum neutralizing antibody titer for complete neutralization of the coronavirus. In some aspects, the composition is capable of stimulating antibody production, wherein the antibodies produced are capable of antibody-mediated viral clearance, optionally wherein the antibody-mediated viral clearance comprises Fc-mediated viral clearance.

[0050] In some aspects, the antigen expression system comprises one or more vectors, the one or more vectors comprising: (a) a vector backbone, wherein the vector backbone comprises a chimpanzee adenovirus vector, optionally wherein the chimpanzee adenovirus vector is a ChAdV68 vector, or an alphavirus vector, optionally wherein the alphavirus vector is a Venezuelan equine encephalitis virus vector; and (b) a cassette encoding the at least two distinct RBD domains, optionally wherein the cassette is integrated between a native promoter nucleotide sequence native to the vector backbone and a poly(A) sequence, optionally wherein the poly(A) sequence is native to the vector backbone.

[0051] In some aspects, the antigen expression system comprises one or more vectors, the one or more vectors comprising a vector backbone derived from a Venezuelan equine encephalitis virus.

[0052] Also provided for herein is a composition for delivery of an antigen expression system, comprising: the antigen expression system, wherein the antigen expression system comprises: (a) optionally, one or more vectors, the one or more vectors comprising: a vector backbone, wherein the backbone comprises: (i) at least one promoter nucleotide sequence, and (ii) at least one polyadenylation (poly(A)) sequence; and (b) an antigen cassette, optionally wherein the antigen cassette is inserted into the vector backbone when present, and wherein the antigen cassette comprises at least one SARS-COV-2 derived nucleic acid sequence encoding an immunogenic polypeptide, wherein the immunogenic polypeptide comprises at least one polypeptide sequence as set forth in Table 16A, Table 16B, Table 16C, or Table 16D, or an epitope-containing fragment thereof, optionally wherein the at least one polypeptide sequence is present in a concatenated polypeptide comprising each of the sequences set forth in Table 16A, Table 16B, Table 16C, or Table 16D, optionally wherein the concatenated polypeptide comprises the order of sequences set forth in Table 16A, Table 16B, Table 16C, or Table 16D.

[0053] In some aspects, the MHC class I epitope encoding sequence comprises at least one polypeptide sequence as set forth in Table 16A, Table 16B, Table 16C, or Table 16D, or an epitope-containing fragment thereof, optionally wherein the at least one polypeptide sequence is present in a concatenated polypeptide comprising each of the sequences set forth in Table 16A, Table 16B, Table 16C, or Table 16D, optionally wherein the concatenated polypeptide comprises the order of sequences set forth in Table 16A, Table 16B, Table 16C, or Table 16D.

[0054] Also provided for is a method for treating a coronavirus infection or preventing a coronavirus infection in a subject, the method comprising administering to the subject any one of the compositions described herein.

[0055] Also provided for herein is a method for inducing an immune response in a subject, the method comprising administering to the subject any one of the compositions described herein.

[0056] In some aspects, the method comprises a homologous prime/boost strategy. In some aspects, the method comprises a heterologous prime/boost strategy, optionally wherein the heterologous prime/boost strategy comprises (a) an identical antigen cassette encoded by different vaccine platforms, (b) different antigen cassettes encoded by the same vaccine platform, and/or (c) different antigen cassettes encoded by different vaccine platforms.

[0057] In some aspects, the method comprises administering a vector or vectors encoding the at least two distinct coronavirus RBD derived nucleic acid sequences and administering a vector or vectors encoding at least one coronavirus derived nucleic acid sequence encoding an immunogenic polypeptide distinct from the at least two distinct RBD domains.

[0058] In some aspects, the vector or vectors encoding the at least two distinct coronavirus RBD derived nucleic acid sequences and the vector or vectors encoding at least one coronavirus derived nucleic acid sequence are co-formulated. In some aspects, the vector or vectors encoding the at least two distinct coronavirus RBD derived nucleic acid sequences and the vector or vectors encoding at least one coronavirus derived nucleic acid sequence are administered separately. In some aspects, the vector or vectors encoding the at least two distinct coronavirus RBD derived nucleic acid sequences and the vector or vectors encoding at least one coronavirus derived nucleic acid sequence are administered concurrently. In some aspects, the at least one coronavirus derived nucleic acid sequence comprises:
[0059] at least one MHC class I epitope comprising a polypeptide sequence as set forth in Table A,
[0060] at least one MHC class II epitope comprising a polypeptide sequence as set forth in Table B,
[0061] at least one MHC class I epitope comprising a polypeptide sequence as set forth in Table C, optionally wherein the at least one MHC I epitope is present in a concatenated polypeptide sequence as set forth in SEQ ID NO:57 or SEQ ID NO:58,
[0062] at least one polypeptide sequence as set forth in Table 7, or an epitope-containing fragment thereof, optionally wherein the at least one polypeptide sequence is present in a concatenated polypeptide sequence as set forth in SEQ ID NO:92,
[0063] at least one polypeptide sequence as set forth in Table 9A, Table 9B, or Table 9C, or an epitope-containing fragment thereof, optionally wherein the at least one polypeptide sequence is present in a concatenated polypeptide comprising each of the sequences set forth in Table 9A, Table 9B, or Table 9C, optionally wherein the concatenated polypeptide comprises the order of sequences set forth in Table 9A, Table 9B, or Table 9C,
[0064] at least one MHC class I epitope comprising a polypeptide sequence as set forth in Table A and/or Table C or MHC class II epitope comprising a polypeptide sequence as set forth in Table B, wherein the encoded SARS-COV-2 immunogenic polypeptide is conserved between SARS-CoV-2 and a Coronavirus species and/or sub-species other than SARS-COV-2, optionally wherein the Coronavirus species and/or sub-species other than SARS-COV-2 is Severe acute respiratory syndrome (SARS) and/or Middle East respiratory syndrome (MERS),
[0065] one or more validated epitopes and/or at least 4, 5, 6, or 7 predicted epitopes, wherein at least 85%, 90%, or 95% of a population carries at least one HLA validated to present at least one of the one or more validated epitopes and/or at least one HLA predicted to present each of the at least 4, 5, 6, or 7 predicted epitopes,
[0066] a SARS-COV-2 Spike protein comprising a Spike polypeptide sequence as set forth in SEQ ID NO:59 or an epitope-containing fragment thereof, optionally wherein the Spike polypeptide comprises a D614G mutation with reference to SEQ ID NO:59, and optionally wherein the Spike polypeptide is encoded by the nucleotide sequence shown in SEQ ID NO:79, SEQ ID NO:83, SEQ ID NO:85, or SEQ ID NO:87,
[0067] a SARS-COV-2 modified Spike protein comprising a mutation selected from the group consisting of: a Spike R682 mutation, a Spike R815 mutation, a Spike K986P mutation, a Spike V987P mutation, and combinations thereof with reference to the Spike polypeptide sequence as set forth in SEQ ID NO:59, and optionally wherein the modified Spike protein comprises a polypeptide sequence as set forth in SEQ ID NO:60 or SEQ ID NO:90 or an epitope-containing fragment thereof,
[0068] a SARS-COV-2 Membrane protein comprising a Membrane polypeptide sequence as set forth in SEQ ID NO:61 or an epitope-containing fragment thereof,
[0069] a SARS-COV-2 Nucleocapsid protein comprising a Nucleocapsid polypeptide sequence as set forth in SEQ ID NO:62 or an epitope-containing fragment thereof,
[0070] a SARS-COV-2 Envelope protein comprising an Envelope polypeptide sequence as set forth in SEQ ID NO:63 or an epitope-containing fragment thereof,
[0071] a variant of any of the above comprising a mutation found in 1% or greater of SARS-COV-2 subtypes, optionally wherein the variant comprises a SARS-COV-2 variant shown in Table 1, and/or optionally wherein the variant comprises a SARS-COV-2 variant Spike protein comprising a Spike D614G mutation with reference to the Spike polypeptide sequence as set forth in SEQ ID NO:59, a SARS-COV-2 variant Spike protein corresponding to a B.1.351 SARS-COV-2 isolate optionally comprising the Spike polypeptide sequence as set forth in SEQ ID NO:112, or a SARS-COV-2 variant Spike protein corresponding to a B.1.1.7 SARS-COV-2 isolate optionally comprising the Spike polypeptide sequence as set forth in SEQ ID NO:110,
[0072] at least one polypeptide sequence as set forth in Table 16A, Table 16B, Table 16C, or Table 16D, or an epitope-containing fragment thereof, optionally wherein the at least one polypeptide sequence is present in a concatenated polypeptide comprising each of the sequences set forth in Table 16A, Table 16B, Table 16C, or Table 16D, optionally wherein the concatenated polypeptide comprises the order of sequences set forth in Table 16A, Table 16B, Table 16C, or Table 16D,
[0073] or combinations thereof.

[0074] In some aspects, the at least one coronavirus derived nucleic acid sequence comprises a MHC class I epitope encoding sequence comprising at least one polypeptide sequence as set forth in Table 16A, Table 16B, Table 16C, or Table 16D, or an epitope-containing fragment thereof, optionally wherein the at least one polypeptide sequence is present in a concatenated polypeptide comprising each of the sequences set forth in Table 16A, Table 16B, Table 16C, or Table 16D, optionally wherein the concatenated polypeptide comprises the order of sequences set forth in Table 16A, Table 16B, Table 16C, or Table 16D.

[0075] In some aspects, the composition further comprises a nanoparticulate delivery vehicle. In some aspects, the nanoparticulate delivery vehicle is a lipid nanoparticle (LNP). In some aspects, the LNP comprises ionizable amino lipids. In some aspects, the ionizable amino lipids comprise MC3-like (dilinoleylmethyl-4-dimethylaminobutyrate) molecules. In some aspects, the nanoparticulate delivery vehicle encapsulates the antigen expression system.

[0076] In some aspects, the one or more vectors comprise one or more+−stranded RNA In some aspects, the one or more+−stranded RNA vectors comprise a 5′ 7-methylguanosine (m7g) cap. In some aspects, the one or more+−stranded RNA vectors are produced by in vitro transcription. In some aspects, the one or more vectors are self-replicating within a mammalian cell.

[0077] In some aspects, the backbone comprises at least one nucleotide sequence of an Aura virus, a Fort Morgan virus, a Venezuelan equine encephalitis virus, a Ross River virus, a Semliki Forest virus, a Sindbis virus, or a Mayaro virus. In some aspects, the backbone comprises at least one nucleotide sequence of a Venezuelan equine encephalitis virus. In some aspects, the backbone comprises at least sequences for nonstructural protein-mediated amplification, a 26S promoter sequence, a poly(A) sequence, a nonstructural protein 1 (nsP1) gene, a nsP2 gene, a nsP3 gene, and a nsP4 gene encoded by the nucleotide sequence of the Aura virus, the Fort Morgan virus, the Venezuelan equine encephalitis virus, the Ross River virus, the Semliki Forest virus, the Sindbis virus, or the Mayaro virus. In some aspects, the backbone comprises at least sequences for nonstructural protein-mediated amplification, a 26S promoter sequence, and a poly(A) sequence encoded by the nucleotide sequence of the Aura virus, the Fort Morgan virus, the Venezuelan equine encephalitis virus, the Ross River virus, the Semliki Forest virus, the Sindbis virus, or the Mayaro virus. In some aspects, sequences for nonstructural protein-mediated amplification are selected from the group consisting of: an alphavirus 5′ UTR, a 51-nt CSE, a 24-nt CSE, a 26S subgenomic promoter sequence, a 19-nt CSE, an alphavirus 3′ UTR, or combinations thereof. In some aspects, the backbone does not encode structural virion proteins capsid, E2 and E1. In some aspects, the antigen cassette is inserted in place of structural virion proteins within the nucleotide sequence of the Aura virus, the Fort Morgan virus, the Venezuelan equine encephalitis virus, the Ross River virus, the Semliki Forest virus, the Sindbis virus, or the Mayaro virus. In some aspects, the Venezuelan equine encephalitis virus comprises the sequence of SEQ ID NO:3 or SEQ ID NO:5. In some aspects, the Venezuelan equine encephalitis virus comprises the sequence of SEQ ID NO:3 or SEQ ID NO:5 further comprising a deletion between base pair 7544 and 11175. In some aspects, the backbone comprises the sequence set forth in SEQ ID NO:6 or SEQ ID NO:7. In some aspects, the antigen cassette is inserted at position 7544 to replace the deletion between base pairs 7544 and 11175 as set forth in the sequence of SEQ ID NO:3 or SEQ ID NO:5. In some aspects, the insertion of the antigen cassette provides for transcription of a polycistronic RNA comprising the nsP1-4 genes and the at least one coronavirus derived nucleic acid sequence, wherein the nsP1-4 genes and the at least one coronavirus derived nucleic acid sequence are in separate open reading frames. In some aspects, the at least one promoter nucleotide sequence is the native 26S promoter nucleotide sequence encoded by the backbone.

[0078] In some aspects, the backbone comprises at least one nucleotide sequence of a chimpanzee adenovirus vector, optionally wherein the chimpanzee adenovirus vector is a ChAdV68 vector. In some aspects, the ChAdV68 vector backbone comprises the sequence set forth in SEQ ID NO:1. In some aspects, the ChAdV68 vector backbone comprises the sequence set forth in SEQ ID NO:1, except that the sequence is fully deleted or functionally deleted in at least one gene selected from the group consisting of the chimpanzee adenovirus E1A, E1B, E2A, E2B, E3, E4, L1, L2, L3, L4, and L5 genes of the sequence set forth in SEQ ID NO:1, optionally wherein the sequence is fully deleted or functionally deleted in: (1) E1A and E1B; (2) E1A, E1B, and E3; or (3) E1A, E1B, E3, and E4 of the sequence set forth in SEQ ID NO: 1. In some aspects, the ChAdV68 vector backbone comprises a gene or regulatory sequence obtained from the sequence of SEQ ID NO:1, optionally wherein the gene is selected from the group consisting of the chimpanzee adenovirus inverted terminal repeat (ITR), E1A, E1B, E2A, E2B, E3, E4, L1, L2, L3, L4, and L5 genes of the sequence set forth in SEQ ID NO: 1. In some aspects, the ChAdV68 vector backbone comprises a partially deleted E4 gene comprising a deleted or partially-deleted E4orf2 region and a deleted or partially-deleted E4orf3 region, and optionally a deleted or partially-deleted E4orf4 region. In some aspects, the ChAdV68 vector backbone comprises at least nucleotides 2 to 36,518 of the sequence set forth in SEQ ID NO:1 and further comprising: (1) an E1 deletion of at least nucleotides 577 to 3403 of the sequence shown in SEQ ID NO: 1, (2) an E3 deletion of at least nucleotides 27,125 to 31,825 of the sequence shown in SEQ ID NO:1, and (3) an E4 deletion of at least nucleotides 34,916 to 35,642 of the sequence shown in SEQ ID NO:1; optionally wherein the antigen cassette is inserted within the E1 deletion. In some aspects, the ChAdV68 vector backbone comprises the sequence set forth in SEQ ID NO:75, optionally wherein the antigen cassette is inserted within the E1 deletion. In some aspects, the ChAdV68 vector backbone comprises one or more deletions between base pair number 577 and 3403 or between base pair 456 and 3014, and optionally wherein the vector further comprises one or more deletions between base pair 27,125 and 31,825 or between base pair 27,816 and 31,333 of the sequence set forth in SEQ ID NO:1. In some aspects, the ChAdV68 vector backbone comprises one or more deletions between base pair number 3957 and 10346, base pair number 21787 and 23370, and base pair number 33486 and 36193 of the sequence set forth in SEQ ID NO: 1. In some aspects, the wherein the cassette is inserted in the ChAdV backbone at the E1 region, E3 region, and/or any deleted AdV region that allows incorporation of the cassette. In some aspects, the ChAdV backbone is generated from one of a first generation, a second generation, or a helper-dependent adenoviral vector

[0079] In some aspects, the at least one promoter nucleotide sequence is selected from the group consisting of: a CMV, a SV40, an EF-1, a RSV, a PGK, a HSA, a MCK, and a EBV promoter sequence. In some aspects, the at least one promoter nucleotide sequence is a CMV promoter sequence. In some aspects, the at least one promoter nucleotide sequence is an exogenous RNA promoter. In some aspects, the second promoter nucleotide sequence is a 26S promoter nucleotide sequence or a CMV promoter nucleotide sequence. In some aspects, the second promoter nucleotide sequence comprises multiple 26S promoter nucleotide sequences or multiple CMV promoter nucleotide sequences, wherein each 26S promoter nucleotide sequence or CMV promoter nucleotide sequence provides for transcription of one or more of the separate open reading frames.

[0080] In some aspects, a MHC class I or MHC class II epitope-encoding coronavirus derived nucleic acid sequence is selected by performing the steps of: (a) obtaining at least one of exome, transcriptome, or whole genome coronavirus nucleotide sequencing data from a coronavirus virus or coronavirus infected cell, wherein the coronavirus nucleotide sequencing data is used to obtain data representing peptide sequences of each of a set of antigens; (b) inputting the peptide sequence of each antigen into a presentation model to generate a set of numerical likelihoods that each of the antigens is presented by one or more of the MHC alleles on a coronavirus infected cell surface, the set of numerical likelihoods having been identified at least based on received mass spectrometry data; and (c) selecting a subset of the set of antigens based on the set of numerical likelihoods to generate a set of selected antigens which are used to generate the MHC class I or MHC class II epitope-encoding coronavirus derived nucleic acid sequence.

[0081] In some aspects, each MHC class I or MHC class II epitope-encoding coronavirus derived nucleic acid sequences is selected by performing the steps of: (a) obtaining at least one of exome, transcriptome, or whole genome coronavirus nucleotide sequencing data from a coronavirus virus or coronavirus infected cell, wherein the coronavirus nucleotide sequencing data is used to obtain data representing peptide sequences of each of a set of antigens; (b) inputting the peptide sequence of each antigen into a presentation model to generate a set of numerical likelihoods that each of the antigens is presented by one or more of the MHC alleles on a coronavirus infected cell surface, the set of numerical likelihoods having been identified at least based on received mass spectrometry data; and (c) selecting a subset of the set of antigens based on the set of numerical likelihoods to generate a set of selected antigens which are used to generate the at least 18 coronavirus derived nucleic acid sequences. In some aspects, a number of the set of selected antigens is 2-20. In some aspects, the presentation model represents dependence between: (a) presence of a pair of a particular one of the MHC alleles and a particular amino acid at a particular position of a peptide sequence; and (b) likelihood of presentation on a coronavirus infected cell surface, by the particular one of the MHC alleles of the pair, of such a peptide sequence comprising the particular amino acid at the particular position. In some aspects, selecting the set of selected antigens comprises selecting antigens that have an increased likelihood of being presented on a coronavirus infected cell surface relative to unselected antigens based on the presentation model, optionally wherein the selected antigens have been validated as being presented by one or more specific HLA alleles. In some aspects, selecting the set of selected antigens comprises selecting antigens that have an increased likelihood of being capable of inducing a coronavirus specific immune response in the subject relative to unselected antigens based on the presentation model. In some aspects, selecting the set of selected antigens comprises selecting antigens that have an increased likelihood of being capable of being presented to naïve T cells by professional antigen presenting cells (APCs) relative to unselected antigens based on the presentation model, optionally wherein the APC is a dendritic cell (DC). In some aspects, selecting the set of selected antigens comprises selecting antigens that have a decreased likelihood of being subject to inhibition via central or peripheral tolerance relative to unselected antigens based on the presentation model. In some aspects, selecting the set of selected antigens comprises selecting antigens that have a decreased likelihood of being capable of inducing an autoimmune response to normal tissue in the subject relative to unselected antigens based on the presentation model. In some aspects, exome or transcriptome coronavirus nucleotide sequencing data is obtained by performing sequencing on a coronavirus virus or coronavirus infected tissue or cell. In some aspects, the sequencing is next generation sequencing (NGS) or any massively parallel sequencing approach.

[0082] In some aspects, the antigen cassette comprises junctional epitope sequences formed by adjacent sequences in the antigen cassette. In some aspects, at least one or each junctional epitope sequence has an affinity of greater than 500 nM for MHC. In some aspects, each junctional epitope sequence is non-self.

[0083] In some aspects, each of the MHC class I and/or MHC class II epitopes is predicted or validated to be capable of presentation by at least one HLA allele present in at least 5% of a population. In some aspects, each of the MHC class I and/or MHC class II epitopes is predicted or validated to be capable of presentation by at least one HLA allele, wherein each antigen/HLA pair has an antigen/HLA prevalence of at least 0.01% in a population. In some aspects, each of the MHC class I and/or MHC class II epitopes is predicted or validated to be capable of presentation by at least one HLA allele, wherein each antigen/HLA pair has an antigen/HLA prevalence of at least 0.1% in a population.

[0084] In some aspects, the antigen cassette does not encode a non-therapeutic MHC class I or class II epitope nucleic acid sequence comprising a translated, wild-type nucleic acid sequence, wherein the non-therapeutic epitope is predicted to be displayed on an MHC allele of the subject. In some aspects, the non-therapeutic predicted MHC class I or class II epitope sequence is a junctional epitope sequence formed by adjacent sequences in the antigen cassette.

[0085] In some aspects, the prediction is based on presentation likelihoods generated by inputting sequences of the non-therapeutic epitopes into a presentation model. In some aspects, an order of the at least one coronavirus derived nucleic acid sequences in the antigen cassette is determined by a series of steps comprising: (a) generating a set of candidate antigen cassette sequences corresponding to different orders of the at least one coronavirus derived nucleic acid sequences; (b) determining, for each candidate antigen cassette sequence, a presentation score based on presentation of non-therapeutic epitopes in the candidate antigen cassette sequence; and (c) selecting a candidate cassette sequence associated with a presentation score below a predetermined threshold as the antigen cassette sequence for an antigen vaccine.

[0086] Also provided for herein is a pharmaceutical composition any of the compositions provided herein and a pharmaceutically acceptable carrier. In some aspects, the composition further comprises an adjuvant. In some aspects, the composition further comprises an immune modulator. In some aspects, the immune modulator is an anti-CTLA4 antibody or an antigen-binding fragment thereof, an anti-PD-1 antibody or an antigen-binding fragment thereof, an anti-PD-L1 antibody or an antigen-binding fragment thereof, an anti-4-1BB antibody or an antigen-binding fragment thereof, or an anti-OX-40 antibody or an antigen-binding fragment thereof.

[0087] Also provided herein is a vector or set of vectors comprising any of the isolated nucleotide sequences or set of isolated nucleotide sequences provided herein.

[0088] Also provided herein is an isolated cell comprising any of the isolated nucleotide sequences or set of isolated nucleotide sequences provided herein, optionally wherein the cell is a BHK-21, CHO, HEK293 or variants thereof, 911, HeLa, A549, LP-293, PER.C6, or AE1-2a cell.

[0089] Also provided herein is a kit comprising any of the compositions provided herein and instructions for use.

[0090] Also provided herein is a method for treating a coronavirus infection or preventing a coronavirus infection in a subject, the method comprising administering to the subject any of the compositions or pharmaceutical compositions provided herein. In some aspects, the coronavirus derived nucleic acid sequence encodes at least one immunogenic polypeptide corresponding to a polypeptide encoded by a coronavirus subtype the subject is infected with or at risk for infection by.

[0091] In some aspects, any of the methods described herein comprises a homologous prime/boost strategy. In some aspects, any of the methods described herein comprises a heterologous prime/boost strategy. In some aspects, the heterologous prime/boost strategy comprises an identical antigen cassette encoded by different vaccine platforms. In some aspects, the heterologous prime/boost strategy comprises different antigen cassettes encoded by the same vaccine platform. In some aspects, the heterologous prime/boost strategy comprises different antigen cassettes encoded by different vaccine platforms. In some aspects, the different antigen cassettes comprise a Spike-encoding cassette and a separate T cell epitope encoding cassette. In some aspects, the different antigen cassettes comprise cassettes encoding distinct epitopes and/or antigens derived from different isolates of coronavirus.

[0092] Also provided herein is a method for inducing an immune response in a subject, the method comprising administering to the subject any of the compositions or pharmaceutical compositions provided herein. In some aspects, the subject expresses at least one HLA allele predicted or known to present a MHC class I or MHC class II epitope encoded by the at least one coronavirus derived nucleic acid sequence. In some aspects, the subject expresses at least one HLA allele predicted or known to present a MHC class I epitope encoded by the at least one coronavirus derived nucleic acid sequence, and wherein the MHC class I epitope comprises at least one MHC class I epitope comprising a polypeptide sequence as set forth in Table A. In some aspects, the subject express at least one HLA allele predicted or known to present a MHC class II epitope encoded by the at least one coronavirus derived nucleic acid sequence, and wherein the MHC class II epitope comprises at least one MHC class II epitope comprising a polypeptide sequence as set forth in Table B. In some aspects, the composition is administered intramuscularly (IM), intradermally (ID), subcutaneously (SC), or intravenously (IV). In some aspects, the composition is administered intramuscularly

[0093] In some aspects, the method further comprises administering to the subject a second vaccine composition. In some aspects, the second vaccine composition is administered prior to the administration of the first composition or pharmaceutical composition. In some aspects, the second vaccine composition is administered subsequent to the administration of any of the compositions or pharmaceutical compositions provided herein. In some aspects, the second vaccine composition is the same as the first composition or pharmaceutical composition administered. In some aspects, the second vaccine composition is different from the first composition or pharmaceutical composition administered. In some aspects, the second vaccine composition comprises a chimpanzee adenovirus vector encoding at least one coronavirus derived nucleic acid sequence. In some aspects, the at least one coronavirus derived nucleic acid sequence encoded by the chimpanzee adenovirus vector is the same as the at least one coronavirus derived nucleic acid sequence of any of the compositions provided herein.

[0094] Also provided herein is a method of manufacturing the one or more vectors of any of the above composition claims, the method comprising: (a) obtaining a linearized DNA sequence comprising the backbone and the antigen cassette; (b) in vitro transcribing the linearized DNA sequence by addition of the linearized DNA sequence to an in vitro transcription reaction containing all the necessary components to transcribe the linearized DNA sequence into RNA, optionally further comprising in vitro addition of the m7g cap to the resulting RNA; and (c) isolating the one or more vectors from the in vitro transcription reaction. In some aspects, the linearized DNA sequence is generated by linearizing a DNA plasmid sequence or by amplification using PCR. In some aspects, the DNA plasmid sequence is generated using one of bacterial recombination or full genome DNA synthesis or full genome DNA synthesis with amplification of synthesized DNA in bacterial cells. In some aspects, isolating the one or more vectors from the in vitro transcription reaction involves one or more of phenol chloroform extraction, silica column based purification, or similar RNA purification methods.

[0095] Also provided herein is a method of manufacturing the composition of any of the above composition claims for delivery of the antigen expression system, the method comprising: (a) providing components for the nanoparticulate delivery vehicle; (b) providing the antigen expression system; and (c) providing conditions sufficient for the nanoparticulate delivery vehicle and the antigen expression system to produce the composition for delivery of the antigen expression system. In some aspects, the conditions are provided by microfluidic mixing.

[0096] Also provided herein is a method of manufacturing an adenovirus vector disclosed herein, the method comprising: obtaining a plasmid sequence comprising the at least one promoter sequence and the antigen cassette; transfecting the plasmid sequence into one or more host cells; and isolating the adenovirus vector from the one or more host cells.

[0097] In some aspects, isolating comprises: lysing the host cell to obtain a cell lysate comprising the adenovirus vector; and purifying the adenovirus vector from the cell lysate.

[0098] In some aspects, the plasmid sequence is generated using one of bacterial recombination or full genome DNA synthesis or full genome DNA synthesis with amplification of synthesized DNA in bacterial cells. In some aspects, the one or more host cells are at least one of CHO, HEK293 or variants thereof, 911, HeLa, A549, LP-293, PER.C6, and AE1-2a cells. In some aspects, purifying the adenovirus vector from the cell lysate involves one or more of chromatographic separation, centrifugation, virus precipitation, and filtration.

[0099] In some aspects, any of the above compositions further comprise a nanoparticulate delivery vehicle. The nanoparticulate delivery vehicle, in some aspects, may be a lipid nanoparticle (LNP). In some aspects, the LNP comprises ionizable amino lipids. In some aspects, the ionizable amino lipids comprise MC3-like (dilinoleylmethyl-4-dimethylaminobutyrate) molecules. In some aspects, the nanoparticulate delivery vehicle encapsulates the antigen expression system.

[0100] In some aspects, any of the above compositions further comprise a plurality of LNPs, wherein the LNPs comprise: the antigen expression system; a cationic lipid; a non-cationic lipid; and a conjugated lipid that inhibits aggregation of the LNPs, wherein at least about 95% of the LNPs in the plurality of LNPs either: have a non-lamellar morphology; or are electron-dense.

[0101] In some aspects, the non-cationic lipid is a mixture of (1) a phospholipid and (2) cholesterol or a cholesterol derivative.

[0102] In some aspects, the conjugated lipid that inhibits aggregation of the LNPs is a polyethyleneglycol (PEG)-lipid conjugate. In some aspects, the PEG-lipid conjugate is selected from the group consisting of: a PEG-diacylglycerol (PEG-DAG) conjugate, a PEG dialkyloxypropyl (PEG-DAA) conjugate, a PEG-phospholipid conjugate, a PEG-ceramide (PEG-Cer) conjugate, and a mixture thereof. In some aspects the PEG-DAA conjugate is a member selected from the group consisting of: a PEG-didecyloxypropyl (C10) conjugate, a PEG-dilauryloxypropyl (C12) conjugate, a PEG-dimyristyloxypropyl (C14) conjugate, a PEG-dipalmityloxypropyl (C16) conjugate, a PEG-distearyloxypropyl (C18) conjugate, and a mixture thereof.

[0103] In some aspects, the antigen expression system is fully encapsulated in the LNPs.

[0104] In some aspects, the non-lamellar morphology of the LNPs comprises an inverse hexagonal (Hu) or cubic phase structure.

[0105] In some aspects, the cationic lipid comprises from about 10 mol % to about 50 mol % of the total lipid present in the LNPs. In some aspects, the cationic lipid comprises from about 20 mol % to about 50 mol % of the total lipid present in the LNPs. In some aspects, the cationic lipid comprises from about 20 mol % to about 40 mol % of the total lipid present in the LNPs.

[0106] In some aspects, the non-cationic lipid comprises from about 10 mol % to about 60 mol % of the total lipid present in the LNPs. In some aspects, the non-cationic lipid comprises from about 20 mol % to about 55 mol % of the total lipid present in the LNPs. In some aspects, the non-cationic lipid comprises from about 25 mol % to about 50 mol % of the total lipid present in the LNPs.

[0107] In some aspects, the conjugated lipid comprises from about 0.5 mol % to about 20 mol % of the total lipid present in the LNPs. In some aspects, the conjugated lipid comprises from about 2 mol % to about 20 mol % of the total lipid present in the LNPs. In some aspects, the conjugated lipid comprises from about 1.5 mol % to about 18 mol % of the total lipid present in the LNPs.

[0108] In some aspects, greater than 95% of the LNPs have a non-lamellar morphology. In some aspects, greater than 95% of the LNPs are electron dense.

[0109] In some aspects, any of the above compositions further comprise a plurality of LNPs, wherein the LNPs comprise: a cationic lipid comprising from 50 mol % to 65 mol % of the total lipid present in the LNPs; a conjugated lipid that inhibits aggregation of LNPs comprising from 0.5 mol % to 2 mol % of the total lipid present in the LNPs; and a non-cationic lipid comprising either: a mixture of a phospholipid and cholesterol or a derivative thereof, wherein the phospholipid comprises from 4 mol % to 10 mol % of the total lipid present in the LNPs and the cholesterol or derivative thereof comprises from 30 mol % to 40 mol % of the total lipid present in the LNPs; a mixture of a phospholipid and cholesterol or a derivative thereof, wherein the phospholipid comprises from 3 mol % to 15 mol % of the total lipid present in the LNPs and the cholesterol or derivative thereof comprises from 30 mol % to 40 mol % of the total lipid present in the LNPs; or up to 49.5 mol % of the total lipid present in the LNPs and comprising a mixture of a phospholipid and cholesterol or a derivative thereof, wherein the cholesterol or derivative thereof comprises from 30 mol % to 40 mol % of the total lipid present in the LNPs.

[0110] In some aspects, any of the above compositions further comprise a plurality of LNPs, wherein the LNPs comprise: a cationic lipid comprising from 50 mol % to 85 mol % of the total lipid present in the LNPs; a conjugated lipid that inhibits aggregation of LNPs comprising from 0.5 mol % to 2 mol % of the total lipid present in the LNPs; and a non-cationic lipid comprising from 13 mol % to 49.5 mol % of the total lipid present in the LNPs.

[0111] In some aspects, the phospholipid comprises dipalmitoylphosphatidylcholine (DPPC), distearoylphosphatidylcholine (DSPC), or a mixture thereof.

[0112] In some aspects, the conjugated lipid comprises a polyethyleneglycol (PEG)-lipid conjugate. In some aspects, the PEG-lipid conjugate comprises a PEG-diacylglycerol (PEG-DAG) conjugate, a PEG-dialkyloxypropyl (PEG-DAA) conjugate, or a mixture thereof. In some aspects, the PEG-DAA conjugate comprises a PEG-dimyristyloxypropyl (PEG-DMA) conjugate, a PEG-distearyloxypropyl (PEG-DSA) conjugate, or a mixture thereof. In some aspects, the PEG portion of the conjugate has an average molecular weight of about 2,000 daltons.

[0113] In some aspects, the conjugated lipid comprises from 1 mol % to 2 mol % of the total lipid present in the LNPs.

[0114] In some aspects, the LNP comprises a compound having a structure of Formula I:

[chemical structure]

or a pharmaceutically acceptable salt, tautomer, prodrug or stereoisomer thereof, wherein: L¹ and L² are each independently -0(C=0)-, —(C=0)0-, —C(=0)-, -0-, —S(0)ₓ—, —S—S—, —C(=0)S—, —SC(=0)-, —R^{a}C(=0)-, —C(=0)R^{a}—, —R^{a}C(=0)R^{a}—, —OC(=0)R^{a}—, —R^{a}C(=0)0- or a direct bond; G¹ is Ci-C₂ alkylene, —(C=0)-, -0(C=0)-, —SC(=0)-, —R^{a}C(=0)- or a direct bond: —C(=0)-, —(C=0)0-, —C(=0)S—, —C(=0)R^{a}— or a direct bond; G is Ci-C₆ alkylene; R^{a} is H or C1-C12 alkyl; R^{1a} and R^{1b} are, at each occurrence, independently either: (a) H or C₁-C₁₂ alkyl; or (b) R^{1a} is H or C₁-C₁₂ alkyl, and R^{1b} together with the carbon atom to which it is bound is taken together with an adjacent Rib and the carbon atom to which it is bound to form a carbon-carbon double bond; R^{2a} and R^{2b} are, at each occurrence, independently either: (a) H or C₁-C₁₂ alkyl; or (b) R^{2a} is H or C₁-C₁₂ alkyl, and R^{2b} together with the carbon atom to which it is bound is taken together with an adjacent R^{2b} and the carbon atom to which it is bound to form a carbon-carbon double bond; R^{3a} and R^{3b} are, at each occurrence, independently either (a): H or C₁-C₁₂ alkyl; or (b) R^{3a} is H or C₁-C₁₂ alkyl, and R^{3b} together with the carbon atom to which it is bound is taken together with an adjacent R and the carbon atom to which it is bound to form a carbon-carbon double bond; R^{4a} and R^{4b} are, at each occurrence, independently either: (a) H or C1-C12 alkyl; or (b) R^{4a} is H or C1-C12 alkyl, and R^{4b} together with the carbon atom to which it is bound is taken together with an adjacent R^{4b} and the carbon atom to which it is bound to form a carbon-carbon double bond; R⁵ and R⁶ are each independently H or methyl; R⁷ is C4-C20 alkyl; R⁸ and R⁹ are each independently C1-C12 alkyl; or R8 and R9, together with the nitrogen atom to which they are attached, form a 5, 6 or 7-membered heterocyclic ring; a, b, c and d are each independently an integer from 1 to 24; and x is 0, 1 or 2.

[0115] In some aspects, the LNP comprises a compound having a structure of Formula II:

[chemical structure]

or a pharmaceutically acceptable salt, tautomer, prodrug or stereoisomer thereof, wherein: L¹ and L² are each independently -0(C=0)-, —(C=0)0- or a carbon-carbon double bond; R^{1a} and R^{1b} are, at each occurrence, independently either (a) H or C₁-C₁₂ alkyl, or (b) R^{1a} is H or C₁-C₁₂ alkyl, and R^{1b} together with the carbon atom to which it is bound is taken together with an adjacent R^{1b} and the carbon atom to which it is bound to form a carbon-carbon double bond; R^{2a} and R^{2b} are, at each occurrence, independently either (a) H or C₁-C₁₂ alkyl, or (b) R^{2a} is H or C₁-C₁₂ alkyl, and R^{2b} together with the carbon atom to which it is bound is taken together with an adjacent R^{2b} and the carbon atom to which it is bound to form a carbon-carbon double bond; R^{3a} and R^{3b} are, at each occurrence, independently either (a) H or C₁-C₁₂ alkyl, or (b) R^{3a} is H or C₁-C₁₂ alkyl, and R^{3b} together with the carbon atom to which it is bound is taken together with an adjacent R^{3b} and the carbon atom to which it is bound to form a carbon-carbon double bond; R^{4a} and R^{4b} are, at each occurrence, independently either (a) H or C₁-C₁₂ alkyl, or (b) R^{4a} is H or Ci-C₁₂ alkyl, and R^{4b} together with the carbon atom to which it is bound is taken together with an adjacent R^{4b} and the carbon atom to which it is bound to form a carbon-carbon double bond; R⁵ and R⁶ are each independently methyl or cycloalkyl; R⁷ is, at each occurrence, independently H or C₁-C₁₂ alkyl; R⁸ and R⁹ are each independently unsubstituted C1-C12 alkyl; or R⁸ and R⁹, together with the nitrogen atom to which they are attached, form a 5, 6 or 7-membered heterocyclic ring comprising one nitrogen atom; a and d are each independently an integer from 0 to 24; b and c are each independently an integer from 1 to 24; and e is 1 or 2, provided that: at least one of R^{1a}, R^{2a}, R^{3a} or R^{4a} is C1-C12 alkyl, or at least one of L¹ or L² is -0(C=0)- or —(C=0)0-; and R^{1a} and R^{1b} are not isopropyl when a is 6 or n-butyl when a is 8.

[0116] In some aspects, any of the above compositions further comprise one or more excipients comprising a neutral lipid, a steroid, and a polymer conjugated lipid. In some aspects, the neutral lipid comprises at least one of 1,2-Distearoyl-sn-glycero-3-phosphocholine (DSPC), 1,2-Dipalmitoyl-sn-glycero-3-phosphocholine (DPPC), 1,2-Dimyristoyl-sn-glycero-3-phosphocholine (DMPC), 1-Palmitoyl-2-olcoyl-sn-glycero-3-phosphocholine (POPC), 1,2-dioleoyl-sn-glycero-3-phosphocholine (DOPC), and 1,2-Dioleoyl-sn-glycero-3-phosphoethanolamine (DOPE). In some aspects, the neutral lipid is DSPC.

[0117] In some aspects, the molar ratio of the compound to the neutral lipid ranges from about 2:1 to about 8:1.

[0118] In some aspects, the steroid is cholesterol. In some aspects, the molar ratio of the compound to cholesterol ranges from about 2:1 to 1:1.

[0119] In some aspects, the polymer conjugated lipid is a pegylated lipid. In some aspects, the molar ratio of the compound to the pegylated lipid ranges from about 100:1 to about 25:1. In some aspects, the pegylated lipid is PEG-DAG, a PEG polyethylene (PEG-PE), a PEG-succinoyl-diacylglycerol (PEG-S-DAG), PEG-cer or a PEG dialkyoxypropylcarbamate. In some aspects, the pegylated lipid has the following structure III:

[chemical structure]

or a pharmaceutically acceptable salt, tautomer or stereoisomer thereof, wherein: R¹⁰ and R¹¹ are each independently a straight or branched, saturated or unsaturated alkyl chain containing from 10 to 30 carbon atoms, wherein the alkyl chain is optionally interrupted by one or more ester bonds; and z has a mean value ranging from 30 to 60. In some aspects, R¹⁰ and R¹¹ are each independently straight, saturated alkyl chains having 12 to 16 carbon atoms. In some aspects, the average z is about 45.

### Start Here

[0120] In some aspects, the LNP self-assembles into non-bilayer structures when mixed with polyanionic nucleic acid. In some aspects, the non-bilayer structures have a diameter between 60 nm and 120 nm. In some aspects, the non-bilayer structures have a diameter of about 70 nm, about 80 nm, about 90 nm, or about 100 nm. In some aspects, wherein the nanoparticulate delivery vehicle has a diameter of about 100 nm.

[0121] Also provided for herein is a vector or set of vectors comprising any of the nucleotide sequence described herein. Also disclosed herein is a vector comprising an isolated nucleotide sequence disclosed herein.

[0122] Also provided for herein is an isolated cell comprising any of the nucleotide sequences or set of isolated nucleotide sequences described herein, optionally wherein the cell is a BHK-21, CHO, HEK293 or variants thereof, 911, HeLa, A549, LP-293, PER.C6, or AE1-2a cell.

[0123] Also provided for herein is a kit comprising any of the compositions described herein and instructions for use. Also disclosed herein is a kit comprising a vector or a composition disclosed herein and instructions for use.

[0124] Also provided for herein is a method for treating a subject suffering from Covid-19, the method comprising administering to the subject any of the compositions or any of the pharmaceutical compositions described herein.

[0125] Also provided for herein is a method for treating a subject infected with or at risk for infection by coronavirus, the method comprising administering to the subject any of the compositions or any of the pharmaceutical compositions described herein.

[0126] Also provided for herein is a method for stimulating an immune response in a subject, the method comprising administering to the subject any of the compositions or any of the pharmaceutical compositions described herein.

[0127] Also disclosed herein is a method for treating a subject, the method comprising administering to the subject a vector disclosed herein or a pharmaceutical composition disclosed herein.

[0128] Also disclosed herein is a method of manufacturing the one or more vectors of any of the above compositions.

[0129] Also disclosed herein is a method of manufacturing any of the compositions disclosed herein.

### BRIEF DESCRIPTION OF THE SEVERAL VIEWS OF THE DRAWINGS

[0130] These and other features, aspects, and advantages of the present invention will become better understood with regard to the following description, and accompanying drawings, where:

[0131] FIG. 1 presents a schematic of the SARS-COV-2 genome structure depicting the at least 14 open reading frames (ORF) identified in. Figure adapted from Zhou et al. (2020) [A pneumonia outbreak associated with a new coronavirus of probable bat origin. Nature, 579(January)].

[0132] FIG. 2 depicts the 16 cleavage products of the replicase ORF1ab and related information. Figure adapted from Wu et al. (2020). [A new coronavirus associated with human respiratory disease in China. Nature, 579(January)]

[0133] FIG. 3 depicts the general vaccination approach of producing a balanced immune response inducing both neutralizing antibodies (from B cells) as well as effector and memory CD8+ T cell responses for maximum efficacy. SARS-COV-2 genome structure adapted from Zhou et al. (2020) [A pneumonia outbreak associated with a new coronavirus of probable bat origin. Nature, 579(January)].

[0134] FIG. 4 demonstrates the known prevalence of the wildtype and D614G variant SARS-Cov-2 Spike protein over time across various geographic locations.

[0135] FIG. 5 demonstrates coverage of cassettes encoding only Spike or encoding Spike and the additional predicted concatenated T cell epitopes over the four populations shown. The first column demonstrates the number of SARS-COV-2 epitopes predicted to be presented and the second column demonstrates the expected number of presented epitopes, based on a 0.2 PPV. Each row shows the protection coverage of each population if a certain number of epitopes is used.

[0136] FIG. 6A illustrates the number of predicted epitopes presented by each MHC class II allele separately for the Spike protein or the additional predicted concatenated T cell epitopes.

[0137] FIG. 6B illustrates the number of the number of SARS-COV-2 epitopes predicted to be presented over the four populations shown from cassettes encoding only Spike (top panel) or encoding Spike and the additional predicted concatenated T cell epitopes (bottom panel).

[0138] FIG. 7A presents the number of training samples containing Class I alleles (with at least 10 samples).

[0139] FIG. 7B presents a histogram depicting the number of training samples per Class I allele versus the number of alleles.

[0140] FIG. 8A shows a Western blot using an anti-Spike S2 antibody for Spike expression in vectors encoding various Spike variations.

[0141] FIG. 8B shows a Western blot using an anti-Spike SI antibody for Spike expression in vectors encoding various Spike variations.

[0142] FIG. 8C shows a Western blot using an anti-Spike SI antibody for Spike expression in vectors encoding full-length Spike, Spike SI alone, or Spike S2 alone.

[0143] FIG. 8D shows a Western blot using an anti-Spike S2 antibody for Spike expression in vectors encoding full-length Spike, Spike SI alone, or Spike S2 alone.

[0144] FIG. 9 shows a Western blot using an anti-Spike S2 antibody for Spike expression in vectors encoding various sequence-optimized Spike variations.

[0145] FIG. 10A depicts a schematic of PCR-based assay to assess RNA splicing of SARS-CoV-2 transcripts.

[0146] FIG. 10B shows PCR amplicons for encoded Spike proteins. Left panel depicts amplicons from cDNA templates from infected 293 cells (“ChAd-Spike (IDT) cDNA”) or from the plasmid encoding the SARS-COV-2 Spike cassette (“Spike Plasmid”). Right panel depicts amplicons from the cDNA of 293 cells infected with a vector encoding Spike SI alone (“SpikeS1”) or full-length Spike (“Spike”).

[0147] FIG. 11 shows PCR amplicons for encoded Spike proteins from the cDNA of 293 cells infected with vector encoding various Spike variations.

[0148] FIG. 12 presents estimated coverages for the percentage of the indicated ancestry populations having at least one HLA estimated to receive at least one immunogenic epitope encoded by TCE5, where receipt of the immunogenic peptide presentation is considered to occur when an individual's HLA is either (1) known to present an encoded epitope (“validated epitope”), or (2) predicted to present at least 4 (Col. 1), 5 (Col. 2), 6 (Col. 3), or 7 (Col. 4) encoded epitopes (“predicted epitope”; EDGE score >0.01). FA=African American, API=Asian or Pacific Islander, EUR=European, HIS=Hispanic

[0149] FIG. 13A presents T cell responses (left panel), Spike-specific IgG antibodies (middle panel) and neutralizing antibodies (right panel) following administration of ChAdV-platforms with Spike-encoding cassettes featuring different sequence optimizations “IDTSpike_{g}” (shown as “Spike V1” or “v1”) or “CTSpike_{g}” (shown as “Spike V2” or “v2”). Balb/c mice immunized with 1×10¹¹ VP ChAdV-based vaccine platform.

[0150] FIG. 13B presents T cell responses (left panel), Spike-specific IgG antibodies (middle panel) and neutralizing antibodies (right panel) following administration of SAM-platforms with Spike-encoding cassettes featuring different sequence optimizations “IDTSpike_{g}” (shown as “Spike V1” or “v1”) or “CTSpike_{g}” (shown as “Spike V2” or “v2”). Balb/c mice immunized with 10 μg SAM-based vaccine platform.

[0151] FIG. 14 presents Spike-specific IgG antibody production following administration of cither ChAdV-platform (left panel) or SAM-platform (right panel) with unmodified or modified (“CTSpikeF2P_{g}” shown as “SpikeF2P”) Spike-encoding cassettes (all vectors utilize Spike sequence v2). Balb/c mice immunized with 1×10¹¹ VP ChAdV-based vaccine platform or 10 μg SAM-based vaccine platform, as indicated.

[0152] FIG. 15A presents T cell responses to Spike (left panel) and T cell responses to the encoded T cell epitopes (right panel) following administration of ChAdV-platforms with a modified Spike-encoding only cassette (“CTSpikeF2P_{g}” shown as “Spike”) and modified Spike together with additional non-Spike T cell epitopes encoded TCE5 (shown as “Spike TCE”). Balb/c mice immunized with 1×10¹¹ VP ChAdV-based vaccine platform. Shown is IFNγ ELISpot, 2 weeks post immunization. T cell response to overlapping peptide pools spanning cither Spike, Nucleocapsid, or Orf3a.

[0153] FIG. 15B presents T cell responses to Spike (left panel) and T cell responses to the encoded T cell epitopes (right panel) following administration of SAM-platforms with a modified Spike-encoding only cassette (“CTSpikeF2P_{g}” shown as “Spike”) and modified Spike together with additional non-Spike T cell epitopes encoded TCE5 (shown as “TCE Spike”). Balb/c mice immunized with 10 μg SAM-based vaccine platform. Shown is IFNγ ELISpot, 2 weeks post immunization. T cell response to overlapping peptide pools spanning either Spike, Nucleocapsid, or Orf3a.

[0154] FIG. 16A presents T cell responses to Spike (top panel; IFNg ELISpot. Sum of response to 8 overlapping peptide pools spanning Spike antigen), T cell responses to the encoded T cell epitopes (middle panel; IFNg ELISpot. Sum of response to 3 overlapping peptide pools spanning NCap, Membrane, and Orf3a), and Spike-specific IgG antibodies (bottom panel; S1 IgG binding measured by MSD ELISA. Interpolated endpoint titer. Geomean, geometric SD) following immunization with SAM constructs including “IDTSpike_{g}” alone (left columns), IDTSpike_{g} expressed from a first subgenomic promoter followed by TCE5 expressed from a second subgenomic promoter (middle columns), or TCE5 expressed from a first subgenomic promoter followed by IDTSpike_{g} expressed from a second subgenomic promoter (right columns). For T cell responses, Balb/c mice were immunized with 10 μg of each vaccine, n=6/group. Splenocyte isolation at 2-weeks post immunization. For IgG response, Balb/c mice immunized with 10 μg of each vaccine, n=4/group. Serum collected and analyzed at 4-weeks post immunization.

[0155] FIG. 16B presents T cell responses to Spike (top panel; IFNg ELISpot. Sum of response to 8 overlapping peptide pools spanning Spike antigen), T cell responses to the encoded T cell epitopes (middle panel; IFNg ELISpot. Sum of response to 3 overlapping peptide pools spanning NCap, Membrane, and Orf3a), and Spike-specific IgG antibodies (bottom panel; S1 IgG binding measured by MSD ELISA. Interpolated endpoint titer. Geomean, geometric SD) following immunization with SAM constructs including “IDTSpike_{g}” alone (first column), IDTSpike_{g} expressed from a first subgenomic promoter followed by TCE6 or TCE7 expressed from a second subgenomic promoter (columns 2 and 4, respectively), or TCE6 or TCE7 expressed from a first subgenomic promoter followed by IDTSpike_{g} expressed from a second subgenomic promoter (columns 3 and 5, respectively). For T cell responses, Balb/c mice were immunized with 10 μg of each vaccine, n=6/group. Splenocyte isolation at 2-weeks post immunization. For IgG response, Balb/c mice immunized with 10 μg of each vaccine, n=4/group. Serum collected and analyzed at 4-weeks post immunization.

[0156] FIG. 16C presents T cell responses to Spike (top panel; IFNg ELISpot. Sum of response to 2 overlapping peptide pools spanning Spike antigen), T cell responses to the encoded T cell epitopes (middle panel; IFNg ELISpot. Sum of response to 2 overlapping peptide pools spanning NCap and Orf3a), and Spike-specific IgG antibodies (bottom panel; SI IgG binding measured by MSD ELISA. Interpolated endpoint titer. Geomean, geometric SD) following immunization with SAM constructs including “CTSpike_{g}” alone (first column), CTSpike_{g} expressed from a first subgenomic promoter followed by TCE5 or TCE8 expressed from a second subgenomic promoter (columns 2 and 4, respectively), or TCE5 or TCE8 expressed from a first subgenomic promoter followed by CTSpike_{g} expressed from a second subgenomic promoter (columns 3 and 5, respectively). For T cell responses, Balb/c mice were immunized with 10 μg of each vaccine, n=6/group. Splenocyte isolation at 2-weeks post immunization. For IgG response, Balb/c mice immunized with 10 μg of each vaccine, n=4/group. Scrum collected and analyzed at 4-weeks post immunization.

[0157] FIG. 17A presents a map of sequences included in TCE10 for Nucleocapsid, including frames with flanking sequences, validated epitopes, predicted epitopes, mutations, and overlap between frames and mutations.

[0158] FIG. 17B presents a map of sequences included in TCE10 for ORF3a, including frames with flanking sequences, validated epitopes, predicted epitopes, mutations, and overlap between frames and mutations.

[0159] FIG. 17C presents a map of sequences included in TCE10 for nsp3, including frames with flanking sequences, validated epitopes, predicted epitopes, mutations, and overlap between frames and mutations.

[0160] FIG. 17D presents a map of sequences included in TCE10 for Membrane, including frames with flanking sequences, validated epitopes, predicted epitopes, mutations, and overlap between frames and mutations.

[0161] FIG. 17E presents a map of sequences included in TCE10 for nsp4, including frames with flanking sequences, validated epitopes, predicted epitopes, mutations, and overlap between frames and mutations.

[0162] FIG. 17F presents a map of sequences included in TCE10 for nsp12, including frames with flanking sequences, validated epitopes, predicted epitopes, mutations, and overlap between frames and mutations.

[0163] FIG. 18A presents a map of sequences included in TCE9 for nsp12, including frames with flanking sequences, validated epitopes, predicted epitopes, mutations, and overlap between frames and mutations.

[0164] FIG. 18B presents a map of sequences included in TCE9 for nsp4, including frames with flanking sequences, validated epitopes, predicted epitopes, mutations, and overlap between frames and mutations.

[0165] FIG. 18C presents a map of sequences included in TCE9 for Membrane, including frames with flanking sequences, validated epitopes, predicted epitopes, mutations, and overlap between frames and mutations.

[0166] FIG. 18D presents a map of sequences included in TCE9 for nsp3, including frames with flanking sequences, validated epitopes, predicted epitopes, mutations, and overlap between frames and mutations.

[0167] FIG. 18E presents a map of sequences included in TCE9 for ORF3a, including frames with flanking sequences, validated epitopes, predicted epitopes, mutations, and overlap between frames and mutations.

[0168] FIG. 18F presents a map of sequences included in TCE9 for Nucleocapsid, including frames with flanking sequences, validated epitopes, predicted epitopes, mutations, and overlap between frames and mutations.

[0169] FIG. 18G presents a map of sequences included in TCE9 for nsp6, including frames with flanking sequences, validated epitopes, predicted epitopes, mutations, and overlap between frames and mutations.

[0170] FIG. 19A presents a map of sequences included in TCE11 for nsp12, including frames with flanking sequences, validated epitopes, predicted epitopes, mutations, and overlap between frames and mutations.

[0171] FIG. 19B presents a map of sequences included in TCE11 for Membrane, including frames with flanking sequences, validated epitopes, predicted epitopes, mutations, and overlap between frames and mutations.

[0172] FIG. 19C presents a map of sequences included in TCE11 for nsp4, including frames with flanking sequences, validated epitopes, predicted epitopes, mutations, and overlap between frames and mutations.

[0173] FIG. 19D presents a map of sequences included in TCE11 for nsp3, including frames with flanking sequences, validated epitopes, predicted epitopes, mutations, and overlap between frames and mutations.

[0174] FIG. 20 presents the percentages of shared candidate 9-mer epitope distribution between SARS-COV-2 and SARS-COV (left panel) and between SARS-COV-2 and MERS (right panel).

[0175] FIG. 21 presents a schematic outline for selection of RBD sequences for inclusion in a vaccine. BLOSUM62 is a function over (AA, AA)→R which is an expression of homology which is a proxy for functional similarity, where larger means more similar. The average BLOSUM62 similarity over a pair of aligned sequences, a and b is the sum of the BLOSUM62 (aᵢ, bᵢ) divided by the length of a. The average BLOSUM62 distance over two aligned sequences is the negation of the negation of the average BLOSUM62 similarity.

[0176] FIG. 22A shows a phylogenetic tree and the viral isolates selected (highlighted) for inclusion of their respective RBD in a vaccine based on an analysis of full-length RBD sequences.

[0177] FIG. 22B shows a phylogenetic tree and the viral isolates selected (highlighted) for inclusion of their respective RBD in a vaccine based on an analysis of RBDΔRBM sequences.

[0178] FIG. 22C shows a phylogenetic tree and the viral isolates selected (highlighted) for inclusion of their respective RBD in a vaccine based on an analysis of RBM sequences alone.

[0179] FIG. 23 shows sarbecovirus clade designations of representative analyzed isolates, including those with the selected RBDs.

[0180] FIG. 24 shows RBD amino acid similarity for representative analyzed isolates, including those with the selected RBDs

[0181] FIG. 25 shows a schematic of “blended” (top panel) and single-vector (bottom panel) pancorona vaccine strategies.

[0182] FIG. 26 shows a Western blot using an anti-SARS-COV-2 polyclonal antibody run under the indicated conditions.

[0183] FIG. 27A shows anti-RBD antibody responses to vaccine matched (grey or black bars) and unmatched RBDs (color bars) measured at 4 wk post prime for Group 1 vaccines (MK/KP/KJ).

[0184] FIG. 27B shows anti-RBD antibody responses to vaccine matched (grey or black bars) and unmatched RBDs (color bars) measured at 4 wk post prime for Group 2 vaccines (DQ/KJ/MK).

[0185] FIG. 27C shows anti-RBD antibody responses to vaccine matched (grey or black bars) and unmatched RBDs (color bars) measured at 4 wk post prime for Group 3 vaccines (GQ/JX/NC).

[0186] FIG. 28 shows a pseudovirus neutralization assay (PNA) for at 4 weeks post prime (top panel) and at 4 weeks post boost (bottom panel) for the indicated “blended” samRNA vectors in naïve mice.

[0187] FIG. 29 shows a pseudovirus neutralization assay (PNA) for the indicated “blended” samRNA vectors in non-naïve mice.

[0188] FIG. 30A shows anti-RBD antibody responses for samRNA vectors expressing a full-length Spike and three RBDs on the same SAM backbone in a homologous prime/boost strategy.

[0189] FIG. 30B shows neutralizing antibody titers assessed by PNA for samRNA vectors expressing a full-length Spike and three RBDs on the same SAM backbone in a homologous prime/boost strategy.

[0190] FIG. 31 shows neutralizing antibody titers assessed by PNA post boost (bottom panel) and post prime (top panel).

[0191] FIG. 32 shows neutralizing antibody titers assessed by PNA for vectors expressing a full-length Spike and three RBDs on the same backbone in a heterologous prime/boost strategy.

[0192] FIG. 33 shows relative TCE RNA expression as determined by RT-qPCR and normalized to another non-coronavirus TCE vector.

[0193] FIG. 34 shows T-cell responses induced by various TCE-encoding vaccine vectors as measured by ELISpot.

[0194] FIG. 35 shows T-cell responses induced by various TCE12 encoding samRNA and ChAdV vaccine vectors as measured by ELISpot.

[0195] FIG. 36 illustrates homologous and heterologous prime/boost regimens in Indian rhesus macaques assessing ChAdV and SAM vaccine platforms encoding different isolates of the SARS-COV-2 Spike protein.

[0196] FIG. 37A presents T cell responses across multiple Spike T cell epitope pools (top panel; Mean+−SE for each pool), T cell responses for individual NHPs directed to a single large Spike T cell epitope pool over time (middle panel), and Spike-specific IgG antibody titers over time (bottom panel) for Group 1. n=5 NHPs

[0197] FIG. 37B presents T cell responses across multiple Spike T cell epitope pools (top panel; Mean+−SE for each pool), T cell responses for individual NHPs directed to a single large Spike T cell epitope pool over time (middle panel), and Spike-specific IgG antibody titers over time (bottom panel) for Group 2. n=5 NHPs

[0198] FIG. 37C presents T cell responses across multiple Spike T cell epitope pools (top panel; Mean+−SE for each pool), T cell responses for individual NHPs directed to a single large Spike T cell epitope pool over time (middle panel), and Spike-specific IgG antibody titers over time (bottom panel) for Group 5. n=5 NHPs

[0199] FIG. 37D presents T cell responses across multiple Spike T cell epitope pools (top panel; Mean+−SE for each pool), T cell responses for individual NHPs directed to a single large Spike T cell epitope pool over time (middle panel), and Spike-specific IgG antibody titers over time (bottom panel) for Group 6. n=5 NHPs

[0200] FIG. 38 presents summaries of T cell responses for individual NHPs directed to a single large Spike T cell epitope pool over time (top panel), T cell responses to the TCE5-encoded epitopes (middle panel), and Spike-specific IgG antibody titers over time (bottom panel) for Group 1. n=5 NHPs

[0201] FIG. 39 presents neutralizing antibody production to both the D614G pseudovirus (left panels) and B.1.351 pseudovirus (right panels) following Boost 1 (left columns) and Boost 2 (right columns) for each of the NHP Groups.

[0202] FIG. 40 presents neutralizing antibody production comparing the relative Nab titer levels against each of the pseudoviruses following Boost 1 (top panels) and following Boost 2 (bottom panels).

[0203] FIG. 41 shows a dosing regimen for Rhesus macaques immunized twice with SAM encoding SARS-COV-2 Spike antigen at specified dose of either 30 μg or 300 μg. Shown are PBMCs assessed by ex-vivo IFNγ ELISpot following overnight stimulation with Spike-specific overlapping peptide pool (left panel) and neutralizing antibodies measured in serum at study week 8 by pseudovirus neutralization assay (right panel).

[0204] FIG. 42 shows anti-RBD IgG titers against various RBD domains as assessed by MSD ELISA for single SAM vectors expressing Group 1 (“V1”), Group 2 (“V2”), or Group 3 (“V3”), antigens (SARS-COV2 Spike plus 3 sarbecovirus RBDs) compared to a SAM-SARS-CoV2 vaccine only (“CoV-2 Spike”). Arrows indicate vaccine components. Anti-RBD or Spike data at 4 weeks post vaccination. Each vaccine was administered at a dose of 5 μg in Balb/c mice.

[0205] FIG. 43 shows anti-RBD IgG titers against various RBD domains as assessed by MSD ELISA for single SAM vectors expressing Group 2 (“V2”) antigens (SARS-COV2 Spike plus 3 sarbecovirus RBDs) compared to a SAM-SARS-COV2 vaccine only (“CoV-2 Spike”). Arrows indicate vaccine components. Shown is a homologous prime/boost strategy with a boost at 4 weeks post prime. Anti-RBD or Spike data at 4 weeks post boost vaccination (week 8). Each vaccine was administered at a dose of 5 μg in Balb/c mice.

[0206] FIG. 44 shows neutralizing antibody titers assessed by PNA for single SAM vectors expressing Group 2 (“V2”) antigens (SARS-COV2 Spike plus 3 sarbecovirus RBDs) compared to a SAM-SARS-COV2 vaccine only (“CoV-2 Spike”). Arrows indicate vaccine components. Shown is a homologous prime/boost strategy with a boost at 4 weeks post prime. Neutralizing titers assessed at 4 weeks post boost vaccination (week 8). Each vaccine was administered at a dose of 5 μg in Balb/c mice.

[0207] FIG. 45 shows anti-RBD IgG titers against various RBD domains as assessed by MSD ELISA for single SAM vectors expressing Group 2 (“V2”) antigens (SARS-COV2 Spike plus 3 sarbecovirus RBDs), a combination of a vector expressing Group 2 antigens a vector expressing TCE12 epitope cassette (“BLENDED”), and compared to a SAM-SARS-COV2 vaccine only (“CoV-2 Spike”). Arrows indicate vaccine components. Shown is a homologous prime/boost strategy with a boost at 4 weeks post prime. Anti-RBD or Spike data at 8 weeks post vaccination. Each vaccine was administered at a dose of 5 μg in Balb/c mice, including 5 μg of each separate vector in the blended composition and administered as a single dose.

[0208] FIG. 46 shows neutralizing antibody titers assessed by PNA for single SAM vectors expressing Group 2 (“V2”) antigens (SARS-COV2 Spike plus 3 sarbecovirus RBDs), a combination of a vector expressing Group 2 antigens a vector expressing TCE12 epitope cassette (“BLENDED”), and compared to a SAM-SARS-COV2 vaccine only (“CoV-2 Spike”). Arrows indicate vaccine components. Shown is a homologous prime/boost strategy with a boost at 4 weeks post prime. Neutralizing titers assessed at 8 weeks post vaccination. Each vaccine was administered at a dose of 5 μg in Balb/c mice, including 5 μg of each separate vector in the blended composition and administered as a single dose.

[0209] FIG. 47 shows T-cell responses induced by TCE12-encoding vaccine vectors against Nsp13, as measured by ELISpot. Shown are responses following of single SAM vectors expressing Group 2 (“3×RBD”) antigens (SARS-COV2 Spike plus 3 sarbecovirus RBDs), a combination of a vector expressing Group 2 antigens and a vector expressing a TCE12 epitope cassette in a blended composition and administered as a single dose (“3×RBD+TCE12”), a combination of a vector expressing Group 2 antigens and a vector expressing a TCE12 epitope cassette administered as separate doses in the right and left leg (“3×RBD+TCE12 (R+L)”), and a vector expressing a TCE12 epitope cassette (“TCE12”), and compared to a SAM-SARS-COV2 vaccine only (“Spike-Delta”). Splenocytes harvested 14 days post vaccination and T-cell responses were measured by ELISpot assay using NSP13 specific overlapping peptide pools. Each vaccine was administered at a dose of 3 μg in Balb/c mice, including 3 μg of each separate vector when in combination.

### DETAILED DESCRIPTION

### I. Definitions

[0210] In general, terms used in the claims and the specification are intended to be construed as having the plain meaning understood by a person of ordinary skill in the art. Certain terms are defined below to provide additional clarity. In case of conflict between the plain meaning and the provided definitions, the provided definitions are to be used.

[0211] As used herein the term “antigen” is a substance that stimulates an immune response. An antigen can be a neoantigen. An antigen can be a “shared antigen” that is an antigen found among a specific population, e.g., a specific population of SARS-COV-2 patients with or at risk of infection for an infectious disease.

[0212] As used herein the term “antigen-based vaccine” is a vaccine composition based on one or more antigens, e.g., a plurality of antigens. The vaccines can be nucleotide-based (e.g., virally based, RNA based, or DNA based), protein-based (e.g., peptide based), or a combination thereof.

[0213] As used herein the term “candidate antigen” is a mutation or other aberration giving rise to a sequence that may represent an antigen.

[0214] As used herein the term “coding region” is the portion(s) of a gene that encode protein.

[0215] As used herein the term “coding mutation” is a mutation occurring in a coding region.

[0216] As used herein the term “ORF” means open reading frame.

[0217] As used herein the term “missense mutation” is a mutation causing a substitution from one amino acid to another.

[0218] As used herein the term “nonsense mutation” is a mutation causing a substitution from an amino acid to a stop codon or causing removal of a canonical start codon.

[0219] As used herein the term “frameshift mutation” is a mutation causing a change in the frame of the protein.

[0220] As used herein the term “indel” is an insertion or deletion of one or more nucleic acids.

[0221] As used herein, the term percent “identity,” in the context of two or more nucleic acid or polypeptide sequences, refer to two or more sequences or subsequences that have a specified percentage of nucleotides or amino acid residues that are the same, when compared and aligned for maximum correspondence, as measured using one of the sequence comparison algorithms described below (e.g., BLASTP and BLASTN or other algorithms available to persons of skill) or by visual inspection. Depending on the application, the percent “identity” can exist over a region of the sequence being compared, e.g., over a functional domain, or, alternatively, exist over the full length of the two sequences to be compared.

[0222] For sequence comparison, typically one sequence acts as a reference sequence to which test sequences are compared. When using a sequence comparison algorithm, test and reference sequences are input into a computer, subsequence coordinates are designated, if necessary, and sequence algorithm program parameters are designated. The sequence comparison algorithm then calculates the percent sequence identity for the test sequence(s) relative to the reference sequence, based on the designated program parameters. Alternatively, sequence similarity or dissimilarity can be established by the combined presence or absence of particular nucleotides, or, for translated sequences, amino acids at selected sequence positions (e.g., sequence motifs).

[0223] Optimal alignment of sequences for comparison can be conducted, e.g., by the local homology algorithm of Smith & Waterman, Adv. Appl. Math. 2:482 (1981), by the homology alignment algorithm of Needleman & Wunsch, J. Mol. Biol. 48:443 (1970), by the search for similarity method of Pearson & Lipman, Proc. Nat'l. Acad. Sci. USA 85:2444 (1988), by computerized implementations of these algorithms (GAP, BESTFIT, FASTA, and TFASTA in the Wisconsin Genetics Software Package, Genetics Computer Group, 575 Science Dr., Madison, Wis.), or by visual inspection (see generally Ausubel et al., infra).

[0224] One example of an algorithm that is suitable for determining percent sequence identity and sequence similarity is the BLAST algorithm, which is described in Altschul et al., J. Mol. Biol. 215:403-410 (1990). Software for performing BLAST analyses is publicly available through the National Center for Biotechnology Information.

[0225] As used herein the term “non-stop or read-through” is a mutation causing the removal of the natural stop codon.

[0226] As used herein the term “epitope” is the specific portion of an antigen typically bound by an antibody or T cell receptor.

[0227] As used herein the term “immunogenic” is the ability to stimulate an immune response, e.g., via T cells, B cells, or both.

[0228] As used herein the term “HLA binding affinity” “MHC binding affinity” means affinity of binding between a specific antigen and a specific MHC allele.

[0229] As used herein the term “bait” is a nucleic acid probe used to enrich a specific sequence of DNA or RNA from a sample.

[0230] As used herein the term “variant” is a difference between a subject's nucleic acids and the reference human genome used as a control.

[0231] As used herein the term “variant call” is an algorithmic determination of the presence of a variant, typically from sequencing.

[0232] As used herein the term “polymorphism” is a germline variant, i.e., a variant found in all DNA-bearing cells of an individual.

[0233] As used herein the term “somatic variant” is a variant arising in non-germline cells of an individual.

[0234] As used herein the term “allele” is a version of a gene or a version of a genetic sequence or a version of a protein.

[0235] As used herein the term “HLA type” is the complement of HLA gene alleles.

[0236] As used herein the term “nonsense-mediated decay” or “NMD” is a degradation of an mRNA by a cell due to a premature stop codon.

[0237] As used herein the term “exome” is a subset of the genome that codes for proteins. An exome can be the collective exons of a genome.

[0238] As used herein the term “logistic regression” is a regression model for binary data from statistics where the logit of the probability that the dependent variable is equal to one is modeled as a linear function of the dependent variables.

[0239] As used herein the term “neural network” is a machine learning model for classification or regression consisting of multiple layers of linear transformations followed by element-wise nonlinearities typically trained via stochastic gradient descent and back -propagation.

[0240] As used herein the term “proteome” is the set of all proteins expressed and/or translated by a cell, group of cells, or individual.

[0241] As used herein the term “peptidome” is the set of all peptides presented by MHC-I or MHC-II on the cell surface. The peptidome may refer to a property of a cell or a collection of cells (e.g., the infectious disease peptidome, meaning the union of the peptidomes of all cells that are infected by the infectious disease).

[0242] As used herein the term “ELISPOT” means Enzyme-linked immunosorbent spot assay—which is a common method for monitoring immune responses in humans and animals.

[0243] As used herein the term “dextramers” is a dextran-based peptide-MHC multimers used for antigen-specific T-cell staining in flow cytometry.

[0244] As used herein the term “tolerance or immune tolerance” is a state of immune non-responsiveness to one or more antigens, e.g. self-antigens.

[0245] As used herein the term “central tolerance” is a tolerance affected in the thymus, either by deleting self-reactive T-cell clones or by promoting self-reactive T-cell clones to differentiate into immunosuppressive regulatory T-cells (Tregs).

[0246] As used herein the term “peripheral tolerance” is a tolerance affected in the periphery by downregulating or anergizing self-reactive T-cells that survive central tolerance or promoting these T cells to differentiate into Tregs.

[0247] The term “sample” can include a single cell or multiple cells or fragments of cells or an aliquot of body fluid, taken from a subject, by means including venipuncture, excretion, ejaculation, massage, biopsy, needle aspirate, lavage sample, scraping, surgical incision, or intervention or other means known in the art.

[0248] The term “subject” encompasses a cell, tissue, or organism, human or non-human, whether in vivo, ex vivo, or in vitro, male or female. The term subject is inclusive of mammals including humans.

[0249] The term “mammal” encompasses both humans and non-humans and includes but is not limited to humans, non-human primates, canines, felines, murines, bovines, equines, and porcines.

[0250] The term “clinical factor” refers to a measure of a condition of a subject, e.g., disease activity or severity. “Clinical factor” encompasses all markers of a subject's health status, including non-sample markers, and/or other characteristics of a subject, such as, without limitation, age and gender. A clinical factor can be a score, a value, or a set of values that can be obtained from evaluation of a sample (or population of samples) from a subject or a subject under a determined condition. A clinical factor can also be predicted by markers and/or other parameters such as gene expression surrogates. Clinical factors can include infection type (e.g., Coronavirus species), infection sub-type (e.g., SARS-COV-2 variant), and medical history.

[0251] The term “antigen-encoding nucleic acid sequences derived from an infection” refers to nucleic acid sequences obtained from infected cells or an infectious disease organism, e.g. via RT-PCR; or sequence data obtained by sequencing the infected cell or infectious disease organism and then synthesizing the nucleic acid sequences using the sequencing data, e.g., via various synthetic or PCR-based methods known in the art. Derived sequences can include nucleic acid sequence variants, such as sequence-optimized nucleic acid sequence variants (e.g., codon-optimized and/or otherwise optimized for expression), that encode the same polypeptide sequence as the corresponding native infectious disease organism nucleic acid sequence. Derived sequences can include nucleic acid sequence variants that encode a modified infectious disease organism polypeptide sequence having one or more (e.g., 1, 2, 3, 4, or 5) mutations relative to a native infectious disease organism polypeptide sequence. For example, a modified polypeptide sequence can have one or more missense mutations relative to the native polypeptide sequence of an infectious disease organism protein.

[0252] The term “coronavirus nucleic acid sequence encoding an immunogenic polypeptide” refers to nucleic acid sequences obtained from a coronavirus virus, e.g. via RT-PCR; or sequence data obtained by sequencing a coronavirus virus or a coronavirus virus infected cell, and then synthesizing the nucleic acid sequences using the sequencing data, e.g., via various synthetic or PCR-based methods known in the art. Derived sequences can include nucleic acid sequence variants, such as sequence-optimized nucleic acid sequence variants (e.g., codon-optimized and/or otherwise optimized for expression), that encode the same polypeptide sequence as the corresponding native coronavirus nucleic acid sequence. Derived sequences can include nucleic acid sequence variants that encode a modified coronavirus polypeptide sequence having one or more (e.g., 1, 2, 3, 4, or 5) mutations relative to a native coronavirus polypeptide sequence. For example, a modified Spike polypeptide sequence can have one or more mutations such as one or more missense mutations of R682, R815, K986P, or V987P relative to the native spike polypeptide sequence of a SARS-COV-2 protein.

[0253] The term “alphavirus” refers to members of the family Togaviridae, and are positive-sense single-stranded RNA viruses. Alphaviruses are typically classified as either Old World, such as Sindbis, Ross River, Mayaro, Chikungunya, and Semliki Forest viruses, or New World, such as eastern equine encephalitis, Aura, Fort Morgan, or Venezuelan equine encephalitis and its derivative strain TC-83. Alphaviruses are typically self-replicating RNA viruses.

[0254] The term “alphavirus backbone” refers to minimal sequence(s) of an alphavirus that allow for self-replication of the viral genome. Minimal sequences can include conserved sequences for nonstructural protein-mediated amplification, a nonstructural protein 1 (nsP1) gene, a nsP2 gene, a nsP3 gene, a nsP4 gene, and a polyA sequence, as well as sequences for expression of subgenomic viral RNA including a subgenomic promoter (e.g., a 26S promoter element).

[0255] The term “sequences for nonstructural protein-mediated amplification” includes alphavirus conserved sequence elements (CSE) well known to those in the art. CSEs include, but are not limited to, an alphavirus 5′ UTR, a 51-nt CSE, a 24-nt CSE, a subgenomic promoter sequence (e.g., a 26S subgenomic promoter sequence), a 19-nt CSE, and an alphavirus 3′ UTR.

[0256] The term “RNA polymerase” includes polymerases that catalyze the production of RNA polynucleotides from a DNA template. RNA polymerases include, but are not limited to, bacteriophage derived polymerases including T3, T7, and SP6.

[0257] The term “lipid” includes hydrophobic and/or amphiphilic molecules. Lipids can be cationic, anionic, or neutral. Lipids can be synthetic or naturally derived, and in some instances biodegradable. Lipids can include cholesterol, phospholipids, lipid conjugates including, but not limited to, polyethyleneglycol (PEG) conjugates (PEGylated lipids), waxes, oils, glycerides, fats, and fat-soluble vitamins. Lipids can also include dilinoleylmethyl-4-dimethylaminobutyrate (MC3) and MC3-like molecules.

[0258] The term “lipid nanoparticle” or “LNP” includes vesicle like structures formed using a lipid containing membrane surrounding an aqueous interior, also referred to as liposomes. Lipid nanoparticles includes lipid-based compositions with a solid lipid core stabilized by a surfactant. The core lipids can be fatty acids, acylglycerols, waxes, and mixtures of these surfactants. Biological membrane lipids such as phospholipids, sphingomyelins, bile salts (sodium taurocholate), and sterols (cholesterol) can be utilized as stabilizers. Lipid nanoparticles can be formed using defined ratios of different lipid molecules, including, but not limited to, defined ratios of one or more cationic, anionic, or neutral lipids. Lipid nanoparticles can encapsulate molecules within an outer-membrane shell and subsequently can be contacted with target cells to deliver the encapsulated molecules to the host cell cytosol. Lipid nanoparticles can be modified or functionalized with non-lipid molecules, including on their surface. Lipid nanoparticles can be single-layered (unilamellar) or multi-layered (multilamellar). Lipid nanoparticles can be complexed with nucleic acid. Unilamellar lipid nanoparticles can be complexed with nucleic acid, wherein the nucleic acid is in the aqueous interior. Multilamellar lipid nanoparticles can be complexed with nucleic acid, wherein the nucleic acid is in the aqueous interior, or to form or sandwiched between

[0259] Abbreviations: MHC: major histocompatibility complex; HLA: human leukocyte antigen, or the human MHC gene locus; NGS: next-generation sequencing; PPV: positive predictive value; TSNA: tumor-specific neoantigen; FFPE: formalin-fixed, paraffin-embedded; NMD: nonsense-mediated decay; NSCLC: non-small-cell lung cancer; DC: dendritic cell.

[0260] It should be noted that, as used in the specification and the appended claims, the singular forms “a,” “an,” and “the” include plural referents unless the context clearly dictates otherwise.

[0261] Unless specifically stated or otherwise apparent from context, as used herein the term “about” is understood as within a range of normal tolerance in the art, for example within 2 standard deviations of the mean. About can be understood as within 10%, 9%, 8%, 7%, 6%, 5%, 4%, 3%, 2%, 1%, 0.5%, 0.1%, 0.05%, or 0.01% of the stated value. Unless otherwise clear from context, all numerical values provided herein are modified by the term about.

[0262] Any terms not directly defined herein shall be understood to have the meanings commonly associated with them as understood within the art of the invention. Certain terms are discussed herein to provide additional guidance to the practitioner in describing the compositions, devices, methods and the like of aspects of the invention, and how to make or use them. It will be appreciated that the same thing may be said in more than one way. Consequently, alternative language and synonyms may be used for any one or more of the terms discussed herein. No significance is to be placed upon whether or not a term is elaborated or discussed herein. Some synonyms or substitutable methods, materials and the like are provided. Recital of one or a few synonyms or equivalents does not exclude use of other synonyms or equivalents, unless it is explicitly stated. Use of examples, including examples of terms, is for illustrative purposes only and does not limit the scope and meaning of the aspects of the invention herein.

[0263] All references, issued patents and patent applications cited within the body of the specification are hereby incorporated by reference in their entirety, for all purposes.

### II. Antigen Identification

[0264] Research methods for NGS analysis of tumor and normal exome and transcriptomes have been described and applied in the antigen identification space. 6.14.15 Certain optimizations for greater sensitivity and specificity for antigen identification in the clinical setting can be considered. These optimizations can be grouped into two areas, those related to laboratory processes and those related to the NGS data analysis. The research methods described can also be applied to identification of antigens in other settings, such as identification of identifying antigens from an infectious disease organism (e.g., coronavirus), an infection in a subject, or an infected cell of a subject. Examples of optimizations are known to those skilled in the art, for example the methods described in more detail in U.S. Pat. No. 10,055,540, US Application Pub. No. US20200010849A1, international patent application publications WO/2018/195357 and WO/2018/208856, U.S. application Ser. No. 16/606,577, and international patent application PCT/US2020/021508, each herein incorporated by reference, in their entirety, for all purposes.

[0265] Methods for identifying antigens (e.g., antigens derived from an infectious disease organism) include identifying antigens that are likely to be presented on a cell surface (e.g., presented by MHC on an infected cell or an immune cell, including professional antigen presenting cells such as dendritic cells), and/or are likely to be immunogenic. As an example, one such method may comprise the steps of: obtaining at least one of exome, transcriptome or whole genome nucleotide sequencing and/or expression data from an infected cell or an infectious disease organism (e.g., coronavirus), wherein the nucleotide sequencing data and/or expression data is used to obtain data representing peptide sequences of each of a set of antigens (e.g., antigens derived from the infectious disease organism); inputting the peptide sequence of each antigen into one or more presentation models to generate a set of numerical likelihoods that each of the antigens is presented by one or more MHC alleles on a cell surface, such as an infected cell of the subject, the set of numerical likelihoods having been identified at least based on received mass spectrometry data; and selecting a subset of the set of antigens based on the set of numerical likelihoods to generate a set of selected antigens.

### IV. Antigens

[0266] Antigens can include nucleotides or polypeptides. For example, an antigen can be an RNA sequence that encodes for a polypeptide sequence. Antigens useful in vaccines can therefore include nucleotide sequences or polypeptide sequences.

[0267] Disclosed herein are peptides and nucleic acid sequences encoding peptides derived from any polypeptide associated with coronaviruses, including combinations of peptides and nucleic acid sequences encoding peptides derived from any polypeptide associated with distinct coronaviruses. Coronaviruses can include, but are not limited to, a clade 1 Sarbecovirus, a clade 2 Sarbecovirus, or a clade 3 Sarbecovirus. Coronaviruses can include, but are not limited to, Coronaviruses associated with GenBank database accession numbers NC_045512.2, NC_004718.3, MT121216.1, DQ648857.1, GQ153542.1, DQ648856.1, AY278489.2, GQ153540.1, MN996532.2, KJ473811.1, NC_014470.1, KC881005.1, MK211377.1, KJ473816.1, MK211376.1, AY572034.1, KP886809.1, MT072864.1, KF569996.1, JX993987.1, MK211378.1, MK211374.1, KJ473815.1, JX993988.1, DQ071615.1, KT444582.1, MZ206298.1, or KJ473814.1. Coronaviruses can include a betacoronavirus or an alphacoronavirus. Coronaviruses can include a betacoronavirus. Coronaviruses can include an alphacoronavirus. Coronaviruses can include a merbecoviorus. Coronaviruses can include an embecovirus.

[0268] Disclosed herein are peptides and nucleic acid sequences encoding peptides derived from any polypeptide associated with coronavirus, a coronavirus infection in a subject, or a coronavirus infected cell of a subject. Antigens can be derived from nucleotide sequences or polypeptide sequences of a coronavirus virus. Polypeptide sequences of coronavirus include, but are not limited to, predicted MHC class I epitopes shown in Table A, predicted MHC class II epitopes shown in Table B, predicted MHC class I epitopes shown in Table C, coronavirus Spike peptides (e.g., peptides derived from SARS-COV-2, such as SEQ ID NO:59), coronavirus Membrane peptides (e.g., peptides derived from SARS-COV-2, such as SEQ ID NO:61), coronavirus Nucleocapsid peptides (e.g., peptides derived from SARS-COV-2, such as SEQ ID NO:62), coronavirus Envelope peptides (e.g., peptides derived from SARS-COV-2, such as SEQ ID NO:63), coronavirus replicase orf1a and orf1b peptides [such as one or more of non-structural proteins (nsp) 1-16], or any other peptide sequence encoded by a coronavirus virus. Peptides and nucleic acid sequences encoding peptides can be derived from the Wuhan-Hu-1 SARS-COV-2 isolate, sometimes referred to as the SARS-COV-2 reference sequence (SEQ ID NO:76; NC_045512.2, herein incorporated by reference for all purposes). Peptides and nucleic acid sequences encoding peptides can be derived from an isolate distinct from the Wuhan-Hu-1 SARS-COV-2 isolate, such as isolates having one or more mutations in proteins (also referred to as protein variants) with reference to the Wuhan-Hu-1 isolate. Vaccination strategies can include multiple vaccines with peptides and nucleic acid sequences encoding peptides derived from distinct isolates. For example, as an illustrative non-limiting example, a vaccine encoding a Spike protein from the Wuhan-Hu-1 SARS-COV-2 isolate can be administered, followed by subsequent administration of a vaccine encoding a Spike protein from the B.1.351 (“South African”) SARS-COV-2 isolate (e.g., SEQ ID NO: 112) or from the B.1.1.7 (“UK”) SARS-COV-2 isolate (e.g., SEQ ID NO:110). The one or more variants can include, but are not limited to, mutations in the coronavirus Spike protein, coronavirus Membrane protein, coronavirus Nucleocapsid protein, coronavirus Envelope protein, coronavirus replicase orf1a and orf1b protein [such as one or more of non-structural proteins (nsp) 1-16], or any other protein sequences encoded by a coronavirus. Variants can be selected based on prevalence of the mutation among coronavirus subtypes/isolates, such as mutations/variants that are present in 1% or greater, 2% or greater, 3% or greater, 4% or greater, 5% or greater, 6% or greater, 7% or greater, 8% or greater, 9% or greater, 10% or greater, 20% or greater, 30% or greater, 40% or greater, 50% or greater, 60% or greater, 70% or greater, 80% or greater, 90% or greater of coronavirus subtypes/isolates. Examples of mutations in greater than 1% of isolates are shown in Table 1. Variants can be selected based on prevalence of the mutation among coronavirus subtypes/isolates present in a specific population, such as a specific demographic or geographic population. An illustrative non-limiting example of a prevalent variant/mutation is the Spike D614G missense mutation found in 60.05% of genomes sequenced worldwide, and 70.46% and 58.49% of the sequences in Europe and North America, respectively. Accordingly, vaccines can be designed to encode at least one immunogenic polypeptide corresponding to a polypeptide encoded by a coronavirus subtype the subject is infected with or at risk for infection by, such as for use in prophylactic vaccines for a specific demographic or geographic population at risk for infection by the specific coronavirus subtype/isolate. Vaccines can be designed to encode at least one immunogenic polypeptide corresponding to a polypeptide encoded by coronavirus and at least one immunogenic polypeptide corresponding to a polypeptide encoded by a Coronavirus species and/or sub-species other than SARS-COV-2, e.g., the Severe acute respiratory syndrome (SARS) 2002-associated species (NC_004718.3, herein incorporated by reference for all purposes) and/or Middle East respiratory syndrome (MERS) 2012-associated species (NC_019843.3, herein incorporated by reference for all purposes). Vaccines can be designed to encode at least one immunogenic polypeptide corresponding to a polypeptide encoded by SARS-COV-2 that is conserved (e.g., 100% amino acid sequence conservation between epitopes) between SARS-COV-2 and a Coronavirus species and/or sub-species other than SARS-CoV-2, e.g., Severe acute respiratory syndrome (SARS) and/or Middle East respiratory syndrome (MERS) species. SARS-COV-2 epitopes that are conserved between SARS-COV-2 and a Coronavirus species and/or sub-species other than SARS-COV-2 can include epitopes derived from a Coronavirus Spike protein, a Coronavirus Membrane protein, a Coronavirus Nucleocapsid protein, a Coronavirus Envelope protein, a Coronavirus replicase orf1a and orf1b protein [such as one or more of non-structural proteins (nsp) 1-16], or any other protein sequences encoded by a Coronavirus.

[0269] Antigens can be selected as part of a “pancorona” vaccine platform that provide broad immunogenicity against multiple coronaviruses, such as multiple coronaviruses in the Sarbecovirus subgenus, which includes the human pathogens SARS-COV and SARS-COV-2. Pancorona vaccines can include encoding receptor binding domains (RBDs) derived from multiple coronaviruses. Pancorona vaccines can include at least two distinct coronavirus receptor binding domain (RBD) derived nucleic acid sequences encoding at least two distinct RBD domain.

[0270] Selection of distinct RBD domains for inclusion in a pancoronavirus vaccine can include analysis of RBD domain sequence similarity to maximize coverage of diverse coronaviruses (e.g., coverage of multiple Sarbecovirus clades). Analysis of sequence similarity can be based upon different sub-domains of an RBD. Without wishing to be bound by theory, selecting RBDs based on the RBM alone can result in selection based on the most varied domain, while choosing based on the RBD sequence outside of the RBM (RBDΔRBM) can result in a selection based on the conservative domain. Both selection criteria have potential advantages. More conserved regions may be better immunogens for antibodies that recognize multiple coronaviruses. Selection based on RBM may provide greater coverage to diverse RBMs. The whole RBD group can combine the advantages of both, but is potentially biased to the conserved domains.

[0271] Pancorona vaccines can include at least two distinct RBD domains are collectively at least 70% identical by amino acid composition to RBD domains from at least two of a clade 1 Sarbecovirus, a clade 2 Sarbecovirus, or a clade 3 Sarbecovirus. Pancorona vaccines can include

[0272] Pancorona vaccines can include at least two distinct RBD domains are collectively at least 70%, 75%, 80%, 85%, or 90% identical by amino acid composition to RBD domains from each of: (A) the clade 3 Sarbecovirus; and (B) the clade 1 Sarbecovirus and/or the clade 2 Sarbecovirus. Pancorona vaccines can include at least two distinct RBD domains that are collectively at least 70%, 75%, 80%, 85%, or 90% identical by amino acid composition to RBD domains from each of NC_045512.2, NC_004718.3, MT121216.1, DQ648857.1, GQ153542.1, DQ648856.1, AY278489.2, GQ153540.1, MN996532.2, KJ473811.1, NC_014470.1, KC881005.1, MK211377.1, KJ473816.1, MK211376.1, AY572034.1, KP886809.1, MT072864.1, KF569996.1, JX993987.1, MK211378.1, MK211374.1, KJ473815.1, JX993988.1, DQ071615.1, KT444582.1, MZ206298.1, and KJ473814.1.

[0273] Pancorona vaccines can include selecting RBD domains based on an analysis of sequence similarity between only respective RBM domains, such as including at least two distinct RBD domains that include RBM domains that are collectively at least 30%, 35%, 40%, 45%, 50%, 55%, 60%, 65%, 70%, 75%, 80%, 85%, or 90% identical by amino acid composition to RBM domains from at least two of a clade 1 Sarbecovirus, a clade 2 Sarbecovirus, or a clade 3 Sarbecovirus.

[0274] Pancorona vaccines can include selecting RBD domains based on an analysis of sequence similarity between the RBD sequence without the RBM domain sequence (RBDΔRBM), such as at least two distinct RBDs where amino acid sequences of the distinct RBD domains other than the amino acid sequences of their respective RBM domains including at least two distinct RBD domains includes RBM domains that are collectively at least 70%, 75%, 80%, 85%, or 90% identical by amino acid composition to RBM domains from at least two of a clade 1 Sarbecovirus, a clade 2 Sarbecovirus, or a clade 3 Sarbecovirus.

[0275] Pancorona vaccines can include at least three distinct coronavirus RBD derived nucleic acid sequences encoding at least three distinct RBD domain. Pancorona vaccines can include at least three distinct coronavirus RBD derived nucleic acid sequences encoding at least three distinct RBD domain.

[0276] Pancorona vaccines can include at least four distinct RBD domains are collectively at least 70% identical by amino acid composition to RBD domains from each of the clade 1 Sarbecovirus, the clade 2 Sarbecovirus, and the clade 3 Sarbecovirus.

[0277] Pancorona vaccines can include at least two, at least three, or at least four distinct coronavirus RBD derived nucleic acid sequences including at least one from a betacoronavirus RBD derived nucleic acid sequences. Pancorona vaccines can include at least two, at least three, or at least four distinct coronavirus RBD derived nucleic acid sequences including each from a betacoronavirus RBD derived nucleic acid sequences. Pancorona vaccines can include at least two, at least three, or at least four distinct coronavirus RBD derived nucleic acid sequences including at least one from a betacoronavirus RBD derived nucleic acid sequence, an alphacoronavirus RBD derived nucleic acid sequence, and combinations thereof.

[0278] Pancorona vaccines can include at least two, at least three, or at least four distinct coronavirus RBD derived nucleic acid sequences including at least one from a sarbecovirus RBD derived nucleic acid sequence, a merbecoviorus RBD derived nucleic acid sequence, a embecovirus RBD derived nucleic acid sequence, and combinations thereof.

[0279] Pancorona vaccines can include at least two distinct coronavirus RBD derived nucleic acid sequences that are encoded by a single polynucleotide sequence. Pancorona vaccines can include at least two distinct coronavirus RBD derived nucleic acid sequences that are encoded by a single antigen cassette (e.g., a multi-cistronic cassette). Pancorona vaccines can include at least two distinct coronavirus RBD derived nucleic acid sequences that are encoded by separate polynucleotide sequences (e.g., where each RBD is encoded on a separate viral backbone).

[0280] RBD domains can include a trimerization domain. Distinct RBD domains can include a distinct trimerization domain. Distinct RBD domains can include the same trimerization domain. RBD trimerization domains include, but are not limited to, a T4 trimerization domain, a MTQ trimerization domain, and a GCN4 trimerization domain. RBD domains can include a coronavirus derived signal-peptide, such as a SARS-COV-2 derived signal-peptide. RBD domains can include an influenza Hemagglutinin, tissue plasminogen activator, and/or Ag2/PRA derived signal-peptide. RBD derived nucleic acid sequences can be linked together with a peptide-linker encoding nucleic acid sequence. Peptide-linker encoding nucleic acid sequences can include a 2A ribosome skipping sequence element (e.g., a E2A ribosome skipping sequence element, a P2A ribosome skipping sequence element, a F2A ribosome skipping sequence element, or a T2A sequence ribosome skipping sequence element). Peptide-linker encoding nucleic acid sequences can include a cleavable peptide linker (e.g., a TEV cleavage site or a furin cleavage site).

[0281] Encoded RBD domains can encode only the RBD domain or can be encoded by a Spike protein encoding the RBD domain (e.g., full-length SARS-COV-2 Spike).

[0282] Antigens can be selected that are predicted to be presented on the cell surface of a cell, such as an infected cell or an immune cell, including professional antigen presenting cells such as dendritic cells. Antigens can be selected that are predicted to be immunogenic. Exemplary antigens predicted using the methods described herein to be presented on the cell surface by an MHC include predicted MHC class I epitopes shown in Table A, predicted MHC class II epitopes shown in Table B, and predicted MHC class I epitopes shown in Table C.

[0283] Antigens can be selected that have been validated to be presented by a specific HLA and/or stimulate an immune response, such as previously reported/validated in the literature (for example, as in Nelde et al. [Nature Immunology volume 22, pages 74-85 2021], Tarke et al. 2021, or Schelien et al. [bioRxiv 2020.08.13.249433]). The magnitude of stimulation of an immune response can be used to guide epitope/antigen selection, such as to select epitopes that stimulate as robust an immune response as possible, including when cassettes have a size constraint. As an illustrative non-limiting example of magnitude based-selection, the following can be used (1) An individual's magnitude is the sum of all epitope magnitudes across their respective diplotype alleles; (2) Each epitopes magnitude=(magnitude of response)×(Frequency of positive response/100), [e.g., using values found in Tarke et al. (Comprehensive analysis of T cell immunodominance and immunoprevalence of SARS-COV-2 epitopes in COVID-19 cases. Cell Rep Med. 2021 Feb. 16; 2(2):100204. doi: 10.1016/j.xcrm.2021.100204. Epub 2021 Jan. 26.), herein incorporated by reference for all purposes]; (3) exclusion of epitopes other than those from starting proteins that span mutations with >5% frequency, optionally with mutations allowed in flanking regions; and/or (4) cassette order determined to minimize unintended junction epitopes across adjacent frames, as well as minimize consecutive frames in the same protein to reduce chance of functional protein fragments, as described herein.

[0284] A cassette can be constructed to encode one or more validated epitopes and/or at least 4, 5, 6, or 7 predicted epitopes, wherein at least 85%, 90%, or 95% of a population carries at least one HLA validated to present at least one of the one or more validated epitopes and/or at least one HLA predicted to present each of the at least 4, 5, 6, or 7 predicted epitopes. A cassette can be constructed to encode one or more validated epitopes and at least 4, 5, 6, or 7 predicted epitopes, wherein at least 85%, 90%, or 95% of a population carries at least one HLA validated to present at least one of the one or more validated epitopes or at least one HLA predicted to present each of the at least 4, 5, 6, or 7 predicted epitopes.

[0285] One or more polypeptides encoded by an antigen nucleotide sequence can comprise at least one of: a binding affinity with MHC with an IC50 value of less than 1000 nM, for MHC Class I peptides a length of 8-15, 8, 9, 10, 11, 12, 13, 14, or 15 amino acids, presence of sequence motifs within or near the peptide promoting proteasome cleavage, and presence or sequence motifs promoting TAP transport. For MHC Class II peptides a length 6-30, 6, 7, 8, 9, 10, 11, 12, 13, 14, 15, 16, 17, 18, 19, 20, 21, 22, 23, 24, 25, 26, 27, 28, 29, or 30 amino acids, presence of sequence motifs within or near the peptide promoting cleavage by extracellular or lysosomal proteases (e.g., cathepsins) or HLA-DM catalyzed HLA binding.

[0286] One or more antigens can be presented on the surface of an infected cell (e.g., a coronavirus infected cell).

[0287] One or more antigens can be immunogenic in a subject having or suspected to have an infection (e.g., a coronavirus infection), e.g., capable of stimulating a T cell response and/or a B cell response in the subject. One or more antigens can be immunogenic in a subject at risk of an infection (e.g., a coronavirus infection), e.g., capable of stimulating a T cell response and/or a B cell response in the subject that provides immunological protection (i.e., immunity) against the infection, e.g., such as stimulating the production of memory T cells, memory B cells, or antibodies specific to the infection.

[0288] One or more antigens can be capable of stimulating a B cell response, such as the production of antibodies that recognize the one or more antigens (e.g., antibodies that recognize a coronavirus antigen and/or virus). Antibodies can recognize linear polypeptide sequences or recognize secondary and tertiary structures. Accordingly, B cell antigens can include linear polypeptide sequences or polypeptides having secondary and tertiary structures, including, but not limited to, full-length proteins, protein subunits, protein domains, or any polypeptide sequence known or predicted to have secondary and tertiary structures. Antigens capable of stimulating a B cell response to an infection can be antigens found on the surface of an infectious disease organism (e.g., coronavirus). Antigens capable of stimulating a B cell response to an infection can be an intracellular antigen expressed in an infectious disease organism. coronavirus antigens capable of stimulating a B cell response include, but are not limited to, coronavirus Spike peptides, coronavirus Membrane peptides, coronavirus Nucleocapsid peptides, and coronavirus Envelope peptides.

[0289] One or more antigens can include a combination of antigens capable of stimulating a T cell response (e.g., peptides including predicted T cell epitope sequences) and distinct antigens capable of stimulating a B cell response (e.g., full-length proteins, protein subunits, protein domains).

[0290] One or more antigens that stimulate an autoimmune response in a subject can be excluded from consideration in the context of vaccine generation for a subject.

[0291] The size of at least one antigenic peptide molecule (e.g., an epitope sequence) can comprise, but is not limited to, about 5, about 6, about 7, about 8, about 9, about 10, about 11, about 12, about 13, about 14, about 15, about 16, about 17, about 18, about 19, about 20, about 21, about 22, about 23, about 24, about 25, about 26, about 27, about 28, about 29, about 30, about 31, about 32, about 33, about 34, about 35, about 36, about 37, about 38, about 39, about 40, about 41, about 42, about 43, about 44, about 45, about 46, about 47, about 48, about 49, about 50, about 60, about 70, about 80, about 90, about 100, about 110, about 120 or greater amino molecule residues, and any range derivable therein. In specific embodiments the antigenic peptide molecules are equal to or less than 50 amino acids.

[0292] Antigenic peptides and polypeptides can be: for MHC Class I 15 residues or less in length and usually consist of between about 8 and about 11 residues, particularly 9 or 10 residues; for MHC Class II, 6-30 residues, inclusive.

[0293] If desirable, a longer peptide can be designed in several ways. In one case, when presentation likelihoods of peptides on HLA alleles are predicted or known, a longer peptide could consist of either: (1) individual presented peptides with an extensions of 2-5 amino acids toward the N- and C-terminus of each corresponding gene product; (2) a concatenation of some or all of the presented peptides with extended sequences for each. In another case, when sequencing reveals a long (>10 residues) epitope sequence present, a longer peptide would consist of: (3) the entire stretch of novel infectious disease-specific amino acids—thus bypassing the need for computational or in vitro test-based selection of the strongest HLA-presented shorter peptide. In both cases, use of a longer peptide allows endogenous processing by patient cells and may lead to more effective antigen presentation leading to increased T cell responses. Longer peptides can also include a full-length protein, a protein subunit, a protein domain, and combinations thereof of a peptide, such as those expressed in an infectious disease organism. Longer peptides (e.g., full-length protein, protein subunit, or protein domain) and combinations thereof can be included to stimulate a B cell response.

[0294] Antigenic peptides and polypeptides can be presented on an HLA protein. In some aspects antigenic peptides and polypeptides are presented on an HLA protein with greater affinity than a wild-type peptide. In some aspects, an antigenic peptide or polypeptide can have an IC50 of at least less than 5000 nM, at least less than 1000 nM, at least less than 500 nM, at least less than 250 nM, at least less than 200 nM, at least less than 150 nM, at least less than 100 nM, at least less than 50 nM or less.

[0295] In some aspects, antigenic peptides and polypeptides do not stimulate an autoimmune response and/or invoke immunological tolerance when administered to a subject.

[0296] Also provided are compositions comprising at least two or more antigenic peptides. In some embodiments the composition contains at least two distinct peptides. At least two distinct peptides can be derived from the same polypeptide. By distinct polypeptides is meant that the peptide vary by length, amino acid sequence, or both. The peptides can be derived from any polypeptide known to or suspected to be associated with an infectious disease organism, or peptides derived from any polypeptide known to or have been found to have altered expression in an infected cell in comparison to a normal cell or tissue (e.g., an infectious disease polynucleotide or polypeptide, including infectious disease polynucleotides or polypeptides with expression restricted to a host cell).

[0297] Antigenic peptides and polypeptides having a desired activity or property can be modified to provide certain desired attributes, e.g., improved pharmacological characteristics, while increasing or at least retaining substantially all of the biological activity of the unmodified peptide to bind the desired MHC molecule and activate the appropriate T cell. For instance, antigenic peptide and polypeptides can be subject to various changes, such as substitutions, either conservative or non-conservative, where such changes might provide for certain advantages in their use, such as improved MHC binding, stability or presentation. By conservative substitutions is meant replacing an amino acid residue with another which is biologically and/or chemically similar, e.g., one hydrophobic residue for another, or one polar residue for another. The substitutions include combinations such as Gly, Ala; Val, Ile, Leu, Met; Asp, Glu; Asn, Gln; Ser, Thr; Lys, Arg; and Phe, Tyr. The effect of single amino acid substitutions may also be probed using D-amino acids. Such modifications can be made using well known peptide synthesis procedures, as described in e.g., Merrifield, Science 232:341-347 (1986), Barany & Merrifield, The Peptides, Gross & Meienhofer, cds. (N.Y., Academic Press), pp. 1-284 (1979); and Stewart & Young, Solid Phase Peptide Synthesis, (Rockford, Ill., Pierce), 2d Ed. (1984).

[0298] Modifications of peptides and polypeptides with various amino acid mimetics or unnatural amino acids can be particularly useful in increasing the stability of the peptide and polypeptide in vivo. Stability can be assayed in a number of ways. For instance, peptidases and various biological media, such as human plasma and serum, have been used to test stability. See, e.g., Verhoef et al., Eur. J. Drug Metab Pharmacokin. 11:291-302 (1986). Half-life of the peptides can be conveniently determined using a 25% human serum (v/v) assay. The protocol is generally as follows. Pooled human serum (Type AB, non-heat inactivated) is delipidated by centrifugation before use. The serum is then diluted to 25% with RPMI tissue culture media and used to test peptide stability. At predetermined time intervals a small amount of reaction solution is removed and added to either 6% aqueous trichloracetic acid or ethanol. The cloudy reaction sample is cooled (4 degrees C.) for 15 minutes and then spun to pellet the precipitated serum proteins. The presence of the peptides is then determined by reversed-phase HPLC using stability-specific chromatography conditions.

[0299] The peptides and polypeptides can be modified to provide desired attributes other than improved serum half-life. For instance, the ability of the peptides to stimulate CTL activity can be enhanced by linkage to a sequence which contains at least one epitope that is capable of inducing a T helper cell response. Immunogenic peptides/T helper conjugates can be linked by a spacer molecule. The spacer is typically comprised of relatively small, neutral molecules, such as amino acids or amino acid mimetics, which are substantially uncharged under physiological conditions. The spacers are typically selected from, e.g., Ala, Gly, or other neutral spacers of nonpolar amino acids or neutral polar amino acids. It will be understood that the optionally present spacer need not be comprised of the same residues and thus can be a hetero- or homo-oligomer. When present, the spacer will usually be at least one or two residues, more usually three to six residues. Alternatively, the peptide can be linked to the T helper peptide without a spacer.

[0300] Polypeptides encoding antigens can be modified to alter processing of the polypeptides, such as protease cleavage and/or other post-translation processing. Polypeptides encoding antigens can be modified such that the antigen favors a specific conformation. Polypeptides encoding antigens can be modified such that the mutations (e.g., one or more missense mutations) disrupt a specific conformation in the antigen, such as through the introduction of prolines that disrupt secondary and tertiary structures (e.g., alpha-helix or beta-sheet formation). Altering, reducing, or eliminating processing or conformation changes may, in some instances, bias the antigen to favor states favorable to neutralizing antibody production. In a series of illustrative examples, SARS-COV-2 Spike mutations at amino acids 682, 815, 987, and 988 are engineered to bias the Spike protein to remain in a predominantly prefusion state, a potentially preferable state for antibody-mediated neutralization. Specifically, without wishing to be bound by theory, mutations at R682 (e.g., R682V) disrupt the Furin cleavage site involved in processing Spike into S1 and S2; mutations at R815 (e.g., R815N) disrupt the cleavage site within S2; and mutations at K986 and V987, such as K986P and V987P introducing two prolines, that interfere with the secondary structure of Spike making it less likely to be processed from the pre to post fusion state. Accordingly, an antigen cassette can encode a modified Spike protein having at least one mutation selected from: a Spike R682V mutation, a Spike R815N mutation, a Spike K986P mutation, a Spike V987P mutation, and combinations thereof with reference the Wuhan-Hu-1 isolate (see SEQ ID NO:59 reference and SEQ ID NO:60/SEQ ID NO:90 containing mutations). Modified polypeptide sequences can be at least 60%, 70%, 80%, or 90% identical to a native coronavirus polypeptide sequence. Modified polypeptide sequences can be at least 91%, 92%, 93%, or 94% identical to a native coronavirus polypeptide sequence. Modified polypeptide sequences can be at least 95%, 96%, 97%, 98%, or 99% identical to a native coronavirus polypeptide sequence. Modified polypeptide sequences can be at least 99.1%, 99.2%, 99.3%, 99.4%, 99.5%, 99.6%, 99.7%, 99.8%, or 99.9% identical to a native coronavirus polypeptide sequence.

[0301] An antigenic peptide can be linked to the T helper peptide either directly or via a spacer either at the amino or carboxy terminus of the peptide. The amino terminus of either the antigenic peptide or the T helper peptide can be acylated. Exemplary T helper peptides include tetanus toxoid 830-843, influenza 307-319, malaria circumsporozoite 382-398 and 378-389.

[0302] Proteins or peptides can be made by any technique known to those of skill in the art, including the expression of proteins, polypeptides or peptides through standard molecular biological techniques, the isolation of proteins or peptides from natural sources, or the chemical synthesis of proteins or peptides. The nucleotide and protein, polypeptide and peptide sequences corresponding to various genes have been previously disclosed, and can be found at computerized databases known to those of ordinary skill in the art. One such database is the National Center for Biotechnology Information's Genbank and GenPept databases located at the National Institutes of Health website. The coding regions for known genes can be amplified and/or expressed using the techniques disclosed herein or as would be known to those of ordinary skill in the art. Alternatively, various commercial preparations of proteins, polypeptides and peptides are known to those of skill in the art.

[0303] In a further aspect, an antigen includes a nucleic acid (e.g. polynucleotide) that encodes an antigenic peptide or portion thereof. The polynucleotide can be, e.g., DNA, cDNA, PNA, CNA, RNA (e.g., mRNA), either single- and/or double-stranded, or native or stabilized forms of polynucleotides, such as, e.g., polynucleotides with a phosphorothioate backbone, or combinations thereof and it may or may not contain introns. A polynucleotide sequence encoding an antigen can be sequence-optimized to improve expression, such as through improving transcription, translation, post-transcriptional processing, and/or RNA stability. For example, polynucleotide sequence encoding an antigen can be codon-optimized. “Codon-optimization” herein refers to replacing infrequently used codons, with respect to codon bias of a given organism, with frequently used synonymous codons. Polynucleotide sequences can be optimized to improve post-transcriptional processing, for example optimized to reduce unintended splicing, such as through removal of splicing motifs (e.g., canonical and/or cryptic/non-canonical splice donor, branch, and/or acceptor sequences) and/or introduction of exogenous splicing motifs (e.g., splice donor, branch, and/or acceptor sequences) to bias favored splicing events. Exogenous intron sequences include, but are not limited to, those derived from SV40 (e.g., an SV40 mini-intron [SEQ ID NO:88]) and derived from immunoglobulins (e.g., human β-globin gene). Exogenous intron sequences can be incorporated between a promoter/enhancer sequence and the antigen(s) sequence. Exogenous intron sequences for use in expression vectors are described in more detail in Callendret et al. (Virology. 2007 Jul. 5; 363(2): 288-302), herein incorporated by reference for all purposes. Polynucleotide sequences can be optimized to improve transcript stability, for example through removal of RNA instability motifs (e.g., AU-rich elements and 3′ UTR motifs) and/or repetitive nucleotide sequences. Polynucleotide sequences can be optimized to improve accurate transcription, for example through removal of cryptic transcriptional initiators and/or terminators. Polynucleotide sequences can be optimized to improve translation and translational accuracy, for example through removal of cryptic AUG start codons, premature polyA sequences, and/or secondary structure motifs. Polynucleotide sequences can be optimized to improve nuclear export of transcripts, such as through addition of a Constitutive Transport Element (CTE), RNA Transport Element (RTE), or Woodchuck Posttranscriptional Regulatory Element (WPRE). Nuclear export signals for use in expression vectors are described in more detail in Callendret et al. (Virology. 2007 Jul. 5; 363(2): 288-302), herein incorporated by reference for all purposes. Polynucleotide sequences can be optimized with respect to GC content, for example to reflect the average GC content of a given organism. Sequence optimization can balance one or more sequence properties, such as transcription, translation, post-transcriptional processing, and/or RNA stability. Sequence optimization can generate an optimal sequence balancing each of transcription, translation, post-transcriptional processing, and RNA stability. Sequence optimization algorithms are known to those of skill in the art, such as GeneArt (Thermo Fisher), Codon Optimization Tool (IDT), Cool Tool, SGI-DNA (La Jolla California). One or more regions of an antigen-encoding protein can be sequence-optimized separately. As a non-limiting illustrative example, coronavirus Spike protein can be sequence-optimized (or unoptimized) in the SI region of the protein and the S2 region is separately optimized (e.g., optimized using a different algorithm and/or optimized for one or more sequence properties specific for the S2 region).

[0304] A method disclosed herein can also include identifying one or more T cells that are antigen-specific for at least one of the antigens in the subset. In some embodiments, the identification comprises co-culturing the one or more T cells with one or more of the antigens in the subset under conditions that expand the one or more antigen-specific T cells. In further embodiments, the identification comprises contacting the one or more T cells with a tetramer comprising one or more of the antigens in the subset under conditions that allow binding between the T cell and the tetramer. In even further embodiments, the method disclosed herein can also include identifying one or more T cell receptors (TCR) of the one or more identified T cells. In certain embodiments, identifying the one or more T cell receptors comprises sequencing the T cell receptor sequences of the one or more identified T cells. The method disclosed herein can further comprise genetically engineering a plurality of T cells to express at least one of the one or more identified T cell receptors; culturing the plurality of T cells under conditions that expand the plurality of T cells; and infusing the expanded T cells into the subject. In some embodiments, genetically engineering the plurality of T cells to express at least one of the one or more identified T cell receptors comprises cloning the T cell receptor sequences of the one or more identified T cells into an expression vector; and transfecting each of the plurality of T cells with the expression vector. In some embodiments, the method disclosed herein further comprises culturing the one or more identified T cells under conditions that expand the one or more identified T cells; and infusing the expanded T cells into the subject.

[0305] Also disclosed herein is an isolated T cell that is antigen-specific for at least one selected antigen in the subset.

[0306] A still further aspect provides an expression vector capable of expressing a polypeptide or portion thereof. Expression vectors for different cell types are well known in the art and can be selected without undue experimentation. Generally, DNA is inserted into an expression vector, such as a plasmid, in proper orientation and correct reading frame for expression. If necessary, DNA can be linked to the appropriate transcriptional and translational regulatory control nucleotide sequences recognized by the desired host, although such controls are generally available in the expression vector. The vector is then introduced into the host through standard techniques. Guidance can be found e.g. in Sambrook et al. (1989) Molecular Cloning, A Laboratory Manual, Cold Spring Harbor Laboratory, Cold Spring Harbor, N.Y.

### V. Vaccine Compositions

[0307] Also disclosed herein is an immunogenic composition, e.g., a vaccine composition, capable of raising a specific immune response, e.g., an infectious disease organism-specific immune response. Vaccine compositions typically comprise one or a plurality of antigens, e.g., selected using a method described herein. Vaccine compositions can also be referred to as vaccines.

[0308] A vaccine can contain between 1 and 30 peptides, 2, 3, 4, 5, 6, 7, 8, 9, 10, 11, 12, 13, 14, 15, 16, 17, 18, 19, 20, 21, 22, 23, 24, 25, 26, 27, 28, 29, or 30 different peptides, 6, 7, 8, 9, 10 11, 12, 13, or 14 different peptides, or 12, 13 or 14 different peptides. Peptides can include post-translational modifications. A vaccine can contain between 1 and 100 or more nucleotide sequences, 2, 3, 4, 5, 6, 7, 8, 9, 10, 11, 12, 13, 14, 15, 16, 17, 18, 19, 20, 21, 22, 23, 24, 25, 26, 27, 28, 29, 30, 31, 32, 33, 34, 35, 36, 37, 38, 39, 40, 41, 42, 43, 44, 45, 46, 47, 48, 49, 50, 51, 52, 53, 54, 55, 56, 57, 58, 59, 60, 61, 62, 63, 64, 65, 66, 67, 68, 69, 70, 71, 72, 73, 74, 75, 76, 77, 78, 79, 80, 81, 82, 83, 84, 85, 86, 87, 88, 89, 90, 91, 92, 93, 94, 95, 96, 97, 98, 99, 100 or more different nucleotide sequences, 6, 7, 8, 9, 10 11, 12, 13, or 14 different nucleotide sequences, or 12, 13 or 14 different nucleotide sequences. A vaccine can contain between 1 and 30 antigen sequences, 2, 3, 4, 5, 6, 7, 8, 9, 10, 11, 12, 13, 14, 15, 16, 17, 18, 19, 20, 21, 22, 23, 24, 25, 26, 27, 28, 29, 30, 31, 32, 33, 34, 35, 36, 37, 38, 39, 40, 41, 42, 43, 44, 45, 46, 47, 48, 49, 50, 51, 52, 53, 54, 55, 56, 57, 58, 59, 60, 61, 62, 63, 64, 65, 66, 67, 68, 69, 70, 71, 72, 73, 74, 75, 76, 77, 78, 79, 80, 81, 82, 83, 84, 85, 86, 87, 88, 89, 90, 91, 92, 93, 94, 95, 96, 97, 98, 99, 100 or more different antigen sequences, 6, 7, 8, 9, 10 11, 12, 13, or 14 different antigen sequences, or 12, 13 or 14 different antigen sequences.

[0309] A vaccine can contain between 1 and 30 antigen-encoding nucleic acid sequences, 2, 3, 4, 5, 6, 7, 8, 9, 10, 11, 12, 13, 14, 15, 16, 17, 18, 19, 20, 21, 22, 23, 24, 25, 26, 27, 28, 29, 30, 31, 32, 33, 34, 35, 36, 37, 38, 39, 40, 41, 42, 43, 44, 45, 46, 47, 48, 49, 50, 51, 52, 53, 54, 55, 56, 57, 58, 59, 60, 61, 62, 63, 64, 65, 66, 67, 68, 69, 70, 71, 72, 73, 74, 75, 76, 77, 78, 79, 80, 81, 82, 83, 84, 85, 86, 87, 88, 89, 90, 91, 92, 93, 94, 95, 96, 97, 98, 99, 100 or more different antigen-encoding nucleic acid sequences, 6, 7, 8, 9, 10 11, 12, 13, or 14 different antigen-encoding nucleic acid sequences, or 12, 13 or 14 different antigen-encoding nucleic acid sequences. Antigen-encoding nucleic acid sequences can refer to the antigen encoding portion of an “antigen cassette.” Features of an antigen cassette are described in greater detail herein. An antigen-encoding nucleic acid sequence can contain one or more epitope-encoding nucleic acid sequences (e.g., an antigen-encoding nucleic acid sequence encoding concatenated T cell epitopes).

[0310] A vaccine can contain between 1 and 30 distinct epitope-encoding nucleic acid sequences, 2, 3, 4, 5, 6, 7, 8, 9, 10, 11, 12, 13, 14, 15, 16, 17, 18, 19, 20, 21, 22, 23, 24, 25, 26, 27, 28, 29, 30, 31, 32, 33, 34, 35, 36, 37, 38, 39, 40, 41, 42, 43, 44, 45, 46, 47, 48, 49, 50, 51, 52, 53, 54, 55, 56, 57, 58, 59, 60, 61, 62, 63, 64, 65, 66, 67, 68, 69, 70, 71, 72, 73, 74, 75, 76, 77, 78, 79, 80, 81, 82, 83, 84, 85, 86, 87, 88, 89, 90, 91, 92, 93, 94, 95, 96, 97, 98, 99, 100 or more distinct epitope-encoding nucleic acid sequences, 6, 7, 8, 9, 10 11, 12, 13, or 14 distinct epitope-encoding nucleic acid sequences, or 12, 13 or 14 distinct epitope-encoding nucleic acid sequences. Epitope-encoding nucleic acid sequences can refer to sequences for individual epitope sequences, such as each of the T cell epitopes in an antigen-encoding nucleic acid sequence encoding concatenated T cell epitopes.

[0311] A vaccine can contain at least two repeats of an epitope-encoding nucleic acid sequence. A used herein, a “repeat” refers to two or more iterations of an identical nucleic acid epitope-encoding nucleic acid sequence (inclusive of the optional 5′ linker sequence and/or the optional 3′ linker sequences described herein) within an antigen-encoding nucleic acid sequence. In one example, the antigen-encoding nucleic acid sequence portion of a cassette encodes at least two repeats of an epitope-encoding nucleic acid sequence. In further non-limiting examples, the antigen-encoding nucleic acid sequence portion of a cassette encodes more than one distinct epitope, and at least one of the distinct epitopes is encoded by at least two repeats of the nucleic acid sequence encoding the distinct epitope (i.e., at least two distinct epitope-encoding nucleic acid sequences). In illustrative non-limiting examples, an antigen-encoding nucleic acid sequence encodes epitopes A, B, and C encoded by epitope-encoding nucleic acid sequences epitope-encoding sequence A (E_{A}), epitope-encoding sequence B (E_{B}), and epitope-encoding sequence C (E_{C}), and examplary antigen-encoding nucleic acid sequences having repeats of at least one of the distinct epitopes are illustrated by, but is not limited to, the formulas below:
[0312] Repeat of one distinct epitope (repeat of epitope A):

E_{A}-E_{B}-E_{C}-E_{A}; or

E_{A}-E_{A}-E_{E}_{B}-E_{C}
[0313] Repeat of multiple distinct epitopes (repeats of epitopes A, B, and C):

E_{A}-E_{B}-E_{C}-E_{A}-E_{B}-E_{C}; or

E_{A}-E_{A}-E_{B}-E_{B}-E_{C}-E_{C}

[0314] Multiple repeats of multiple distinct epitopes (repeats of epitopes A, B, and C):

E_{A}-E_{B}-E_{C}-E_{A}-E_{B}-E_{C}-E_{A}-E_{B}-E_{C}; or

E_{A}-E_{A}-E_{A}-E_{B}-E_{B}-E_{B}-E_{C}-E_{C}-E_{C}

[0315] The above examples are not limiting and the antigen-encoding nucleic acid sequences having repeats of at least one of the distinct epitopes can encode each of the distinct epitopes in any order or frequency. For example, the order and frequency can be a random arrangement of the distinct epitopes, e.g., in an example with epitopes A, B, and C, by the formula E_{A}-E_{B}-E_{C}-E_{C}-E_{A}-E_{B}-E_{A}-E_{C}-E_{A}-E_{C}-E_{C}-E_{B}.

[0316] Also provided for herein is an antigen-encoding cassette, the antigen-encoding cassette having at least one antigen-encoding nucleic acid sequence described, from 5′ to 3′, by the formula:

(Eₓ-(E^{N}ₙ)_{y})_{z}
[0317] where E represents a nucleotide sequence comprising at least one of the at least one distinct epitope-encoding nucleic acid sequences,
[0318] n represents the number of separate distinct epitope-encoding nucleic acid sequences and is any integer including 0,
[0319] E^{N} represents a nucleotide sequence comprising the separate distinct epitope-encoding nucleic acid sequence for each corresponding n,
[0320] for each iteration of z: x=0 or 1, y=0 or 1 for each n, and at least one of x or y=1, and z=2 or greater, wherein the antigen-encoding nucleic acid sequence comprises at least two iterations of E, a given E^{N}, or a combination thereof.

[0321] Each E or E^{N} can independently comprise any epitope-encoding nucleic acid sequence described herein (e.g., a nucleotide sequence encoding a polypeptide sequence as set forth in Table A, Table B, and/or Table C). For example, Each E or E^{N} can independently comprises a nucleotide sequence described, from 5′ to 3′, by the formula (L5b-Ne-L3d), where N comprises the distinct epitope-encoding nucleic acid sequence associated with each E or E^{N}, where c=1, L5 comprises a 5′ linker sequence, where b=0 or 1, and L3 comprises a 3′ linker sequence, where d=0 or 1. Epitopes and linkers that can be used are further described herein..

[0322] Repeats of an epitope-encoding nucleic acid sequences (inclusive of optional 5′ linker sequence and/or the optional 3′ linker sequences) can be linearly linked directly to one another (e.g., E_{A}-E_{A}- . . . as illustrated above). Repeats of an epitope-encoding nucleic acid sequences can be separated by one or more additional nucleotides sequences. In general, repeats of an epitope-encoding nucleic acid sequences can be separated by any size nucleotide sequence applicable for the compositions described herein. In one example, repeats of an epitope-encoding nucleic acid sequences can be separated by a separate distinct epitope-encoding nucleic acid sequence (e.g., E_{A}-E_{B}-E_{C}-E_{A} . . . , as illustrated above). In examples where repeats are separated by a single separate distinct epitope-encoding nucleic acid sequence, and each epitope-encoding nucleic acid sequences (inclusive of optional 5′ linker sequence and/or the optional 3′ linker sequences) encodes a peptide 25 amino acids in length, the repeats can be separated by 75 nucleotides, such as in antigen-encoding nucleic acid represented by E_{A}-E_{B}-E_{A} . . . , E_{A} is separated by 75 nucleotides. In an illustrative example, an antigen-encoding nucleic acid having the sequence VTNTEMFVTAPDNLGYMYEVQWPGQTQPQIANCSVYDFFVWLHYYSVRDTVTNTEMF VTAPDNLGYMYEVQWPGQTQPQIANCSVYDFFVWLHYYSVRDT (SEQ ID NO: 115) encoding repeats of 25mer antigens Trp1 (VTNTEMFVTAPDNLGYMYEVQWPGQ; SEQ ID NO: 116) and Trp2 (TQPQIANCSVYDFFVWLHYYSVRDT; SEQ ID NO: 117), the repeats of Trp1 are separated by the 25mer Trp2 and thus the repeats of the Trp1 epitope-encoding nucleic acid sequences are separated the 75 nucleotide Trp2 epitope-encoding nucleic acid sequence. In examples where repeats are separated by 2, 3, 4, 5, 6, 7, 8, or 9 separate distinct epitope-encoding nucleic acid sequence, and each epitope-encoding nucleic acid sequences (inclusive of optional 5′ linker sequence and/or the optional 3′ linker sequences) encodes a peptide 25 amino acids in length, the repeats can be separated by 150, 225, 300, 375, 450, 525, 600, or 675 nucleotides, respectively.

[0323] In one embodiment, different peptides and/or polypeptides or nucleotide sequences encoding them are selected so that the peptides and/or polypeptides capable of associating with different MHC molecules, such as different MHC class I molecules and/or different MHC class II molecules. In some aspects, one vaccine composition comprises coding sequence for peptides and/or polypeptides capable of associating with the most frequently occurring MHC class I molecules and/or different MHC class II molecules. Hence, vaccine compositions can comprise different fragments capable of associating with at least 2 preferred, at least 3 preferred, or at least 4 preferred MHC class I molecules and/or different MHC class II molecules.

[0324] The vaccine composition can stimulate a specific cytotoxic T-cell response and a specific helper T-cell response.

[0325] The vaccine composition can stimulate a specific B-cell response (e.g., an antibody response).

[0326] The vaccine composition can stimulate a specific cytotoxic T-cell response, a specific helper T-cell response, and/or a specific B-cell response. The vaccine composition can stimulate a specific cytotoxic T-cell response and a specific B-cell response. The vaccine composition can stimulate a specific helper T-cell response and a specific B-cell response. The vaccine composition can stimulate a specific cytotoxic T-cell response, a specific helper T-cell response, and a specific B-cell response.

[0327] A combination of vaccine compositions can stimulate a specific cytotoxic T-cell response, a specific helper T-cell response, and/or a specific B-cell response. Vaccine compositions can be homologous and stimulate a specific cytotoxic T-cell response, a specific helper T-cell response, and/or a specific B-cell response in combination. Vaccine compositions can be homologous and stimulate a specific cytotoxic T-cell response, a specific helper T-cell response, and a specific B-cell response in combination. Vaccine compositions can be heterologous and stimulate a specific cytotoxic T-cell response, a specific helper T-cell response, and/or a specific B-cell response in combination. Vaccine compositions can be heterologous and stimulate a specific cytotoxic T-cell response, a specific helper T-cell response, and a specific B-cell response in combination. Heterologous vaccines include an identical antigen cassette encoded by different vaccine platforms, e.g., a viral vaccine (e.g., a ChAdV-based platform) and a mRNA vaccine (e.g., a SAM-based platform). Heterologous vaccines include different antigen cassettes (e.g., a Spike cassette and a separate T cell epitope encoding cassette, or epitopes/antigens derived from different subtype isolates of SARS-COV-2, such as Spike protein variants from a Wuhan-Hu-1 subtype isolate and a B.1.351 subtype isolate) encoded by the same vaccine platform, e.g., either a viral vaccine (e.g., a ChAdV-based platform) or a mRNA vaccine (e.g., a SAM-based platform). Heterologous vaccines include different antigen cassettes (e.g., a Spike cassette and a separate T cell epitope encoding cassette or epitopes/antigens derived from different isolate/subtype of coronavirus, such as Spike protein variants from a Wuhan-Hu-1 subtype isolate and a B.1.351 subtype isolate, and/or difference sarbecovirus isolates) encoded by different vaccine platforms, e.g., a viral vaccine (e.g., a ChAdV-based platform) and a mRNA vaccine (e.g., a SAM-based platform). For example, as an illustrative non-limiting example, a viral vaccine (e.g., a ChAdV-based platform) can in particular stimulate a robust cytotoxic T-cell response and a mRNA vaccine (e.g., a SAM-based platform) can in particular stimulate a robust B-cell response.

[0328] A vaccine composition can further comprise an adjuvant and/or a carrier. Examples of useful adjuvants and carriers are given herein below. A composition can be associated with a carrier such as e.g. a protein or an antigen-presenting cell such as, e.g., a dendritic cell (DC) capable of presenting the peptide to a T-cell.

[0329] Adjuvants are any substance whose admixture into a vaccine composition increases or otherwise modifies the immune response to an antigen. Carriers can be scaffold structures, for example a polypeptide or a polysaccharide, to which an antigen, is capable of being associated. Optionally, adjuvants are conjugated covalently or non-covalently.

[0330] The ability of an adjuvant to increase an immune response to an antigen is typically manifested by a significant or substantial increase in an immune-mediated reaction, or reduction in disease symptoms. For example, an increase in humoral immunity is typically manifested by a significant increase in the titer of antibodies raised to the antigen, and an increase in T-cell activity is typically manifested in increased cell proliferation, or cellular cytotoxicity, or cytokine secretion. An adjuvant may also alter an immune response, for example, by changing a primarily humoral or Th response into a primarily cellular, or Th response.

[0331] Suitable adjuvants include, but are not limited to 1018 ISS, alum, aluminum salts, Amplivax, AS15, BCG, CP-870,893, CpG7909, CyaA, dSLIM, GM-CSF, IC30, IC31, Imiquimod, ImuFact IMP321, IS Patch, ISS, ISCOMATRIX, JuvImmune, Lipo Vac, MF59, monophosphoryl lipid A, Montanide IMS 1312, Montanide ISA 206, Montanide ISA 50V, Montanide ISA-51, OK-432, OM-174, OM-197-MP-E_{C}, ONTAK, PepTel vector system, PLG microparticles, resiquimod, SRL172, Virosomes and other Virus-like particles, YF-17D, VEGF trap, R848, beta-glucan, Pam3Cys, Aquila's QS21 stimulon (Aquila Biotech, Worcester, Mass., USA) which is derived from saponin, mycobacterial extracts and synthetic bacterial cell wall mimics, and other proprietary adjuvants such as Ribi's Detox. Quil or Superfos. Adjuvants such as incomplete Freund's or GM-CSF are useful. Several immunological adjuvants (e.g., MF59) specific for dendritic cells and their preparation have been described previously (Dupuis M, et al., Cell Immunol. 1998; 186(1): 18-27; Allison A C; Dev Biol Stand. 1998; 92:3-11). Also cytokines can be used. Several cytokines have been directly linked to influencing dendritic cell migration to lymphoid tissues (e.g., TNF-alpha), accelerating the maturation of dendritic cells into efficient antigen-presenting cells for T-lymphocytes (e.g., GM-CSF, IL-1 and IL-4) (U.S. Pat. No. 5,849,589, specifically incorporated herein by reference in its entirety) and acting as immunoadjuvants (e.g., IL-12) (Gabrilovich D I, et al., J Immunother Emphasis Tumor Immunol. 1996 (6):414-418).

[0332] CpG immunostimulatory oligonucleotides have also been reported to enhance the effects of adjuvants in a vaccine setting. Other TLR binding molecules such as RNA binding TLR 7, TLR 8 and/or TLR 9 may also be used.

[0333] Other examples of useful adjuvants include, but are not limited to, chemically modified CpGs (e.g. CpR, Idera), Poly(I:C)(e.g. polyi:CI2U), non-CpG bacterial DNA or RNA as well as immunoactive small molecules and antibodies such as cyclophosphamide, sunitinib, bevacizumab, celebrex, NCX-4016, sildenafil, tadalafil, vardenafil, sorafinib, XL-999, CP-547632, pazopanib, ZD2171, AZD2171, ipilimumab, tremelimumab, and SC58175, which may act therapeutically and/or as an adjuvant. The amounts and concentrations of adjuvants and additives can readily be determined by the skilled artisan without undue experimentation. Additional adjuvants include colony-stimulating factors, such as Granulocyte Macrophage Colony Stimulating Factor (GM-CSF, sargramostim).

[0334] A vaccine composition can comprise more than one different adjuvant. Furthermore, a therapeutic composition can comprise any adjuvant substance including any of the above or combinations thereof. It is also contemplated that a vaccine and an adjuvant can be administered together or separately in any appropriate sequence.

[0335] A carrier (or excipient) can be present independently of an adjuvant. The function of a carrier can for example be to increase the molecular weight of in particular mutant to increase activity or immunogenicity, to confer stability, to increase the biological activity, or to increase serum half-life. Furthermore, a carrier can aid presenting peptides to T-cells. A carrier can be any suitable carrier known to the person skilled in the art, for example a protein or an antigen presenting cell. A carrier protein could be but is not limited to keyhole limpet hemocyanin, serum proteins such as transferrin, bovine serum albumin, human serum albumin, thyroglobulin or ovalbumin, immunoglobulins, or hormones, such as insulin or palmitic acid. For immunization of humans, the carrier is generally a physiologically acceptable carrier acceptable to humans and safe. However, tetanus toxoid and/or diphtheria toxoid are suitable carriers. Alternatively, the carrier can be dextrans for example Sepharose.

[0336] Cytotoxic T-cells (CTLs) recognize an antigen in the form of a peptide bound to an MHC molecule rather than the intact foreign antigen itself. The MHC molecule itself is located at the cell surface of an antigen presenting cell. Thus, an activation of CTLs is possible if a trimeric complex of peptide antigen, MHC molecule, and APC is present. Correspondingly, it may enhance the immune response if not only the peptide is used for activation of CTLs, but if additionally APCs with the respective MHC molecule are added. Therefore, in some embodiments a vaccine composition additionally contains at least one antigen presenting cell.

[0337] Antigens can also be included in viral vector-based vaccine platforms, such as vaccinia, fowlpox, self-replicating alphavirus, marabavirus, adenovirus (See, e.g., Tatsis et al., Adenoviruses, Molecular Therapy (2004) 10, 616-629), or lentivirus, including but not limited to second, third or hybrid second/third generation lentivirus and recombinant lentivirus of any generation designed to target specific cell types or receptors (See, e.g., Hu et al., Immunization Delivered by Lentiviral Vectors for Cancer and Infectious Diseases, Immunol Rev. (2011) 239(1): 45-61, Sakuma et al., Lentiviral vectors: basic to translational, Biochem J. (2012) 443(3):603-18, Cooper et al., Rescue of splicing-mediated intron loss maximizes expression in lentiviral vectors containing the human ubiquitin C promoter, Nucl. Acids Res. (2015) 43 (1): 682-690, Zufferey et al., Self-Inactivating Lentivirus Vector for Safe and Efficient In Vivo Gene Delivery, J. Virol. (1998) 72 (12): 9873-9880). Dependent on the packaging capacity of the above mentioned viral vector-based vaccine platforms, this approach can deliver one or more nucleotide sequences that encode one or more antigen peptides. The sequences may be flanked by non-mutated sequences, may be separated by linkers or may be preceded with one or more sequences targeting a subcellular compartment (See, e.g., Gros et al., Prospective identification of neoantigen-specific lymphocytes in the peripheral blood of melanoma patients, Nat Med. (2016) 22 (4):433-8, Stronen et al., Targeting of cancer neoantigens with donor-derived T cell receptor repertoires, Science. (2016) 352 (6291): 1337-41, Lu et al., Efficient identification of mutated cancer antigens recognized by T cells associated with durable tumor regressions, Clin Cancer Res. (2014) 20(13):3401-10). Upon introduction into a host, infected cells express the antigens, and thereby stimulate a host immune (e.g., CTL) response against the peptide(s). Vaccinia vectors and methods useful in immunization protocols are described in, e.g., U.S. Pat. No. 4,722,848. Another vector is BCG (Bacille Calmette Guerin). BCG vectors are described in Stover et al. (Nature 351:456-460 (1991)). A wide variety of other vaccine vectors useful for therapeutic administration or immunization of antigens, e.g., Salmonella typhi vectors, and the like will be apparent to those skilled in the art from the description herein.

### V.A. Antigen Cassette

[0338] The methods employed for the selection of one or more antigens, the cloning and construction of a “cassette” and its insertion into a viral vector are within the skill in the art given the teachings provided herein. By “antigen cassette” or “cassette” is meant the combination of a selected antigen or plurality of antigens (e.g., antigen-encoding nucleic acid sequences) and the other regulatory elements necessary to transcribe the antigen(s) and express the transcribed product. The selected antigen or plurality of antigens can refer to distinct epitope sequences, e.g., an antigen-encoding nucleic acid sequence in the cassette can encode an epitope-encoding nucleic acid sequence (or plurality of epitope-encoding nucleic acid sequences) such that the epitopes are transcribed and expressed. An antigen or plurality of antigens can be operatively linked to regulatory components in a manner which permits transcription. Such components include conventional regulatory elements that can drive expression of the antigen(s) in a cell transfected with the viral vector. Thus the antigen cassette can also contain a selected promoter which is linked to the antigen(s) and located, with other, optional regulatory elements, within the selected viral sequences of the recombinant vector. A cassette can have one or more antigen-encoding nucleic acid sequences, such as a cassette containing multiple antigen-encoding nucleic acid sequences each independently operably linked to separate promoters and/or linked together using other multicistonic systems, such as 2A ribosome skipping sequence elements (e.g., E2A, P2A, F2A, or T2A sequences) or Internal Ribosome Entry Site (IRES) sequence elements. A linker can also have a cleavage site, such as a TEV or furin cleavage site. Linkers with cleavage sites can be used in combination with other elements, such as those in a multicistronic system. In a non-limiting illustrative example, a furin protease cleavage site can be used in conjuction with a 2A ribosome skipping sequence element such that the furin protease cleavage site is configured to facilitate removal of the 2A sequence following translation. In a cassette containing more than one antigen-encoding nucleic acid sequences, each antigen-encoding nucleic acid sequence can contain one or more epitope-encoding nucleic acid sequences (e.g., an antigen-encoding nucleic acid sequence encoding concatenated T cell epitopes). In illustrative examples of multicistronic formats, cassettes encoding coronavirus antigens are configured as follows: (1) endogenous 26S promoter-Spike protein-T2A-Membrane protein, or (2) endogenous 26S promoter-Spike protein-26S promoter-concatenated T cell epitopes.

[0339] Useful promoters can be constitutive promoters or regulated (inducible) promoters, which will enable control of the amount of antigen(s) to be expressed. For example, a desirable promoter is that of the cytomegalovirus immediate early promoter/enhancer [see, e.g., Boshart et al, Cell, 41:521-530 (1985)]. Another desirable promoter includes the Rous sarcoma virus LTR promoter/enhancer. Still another promoter/enhancer sequence is the chicken cytoplasmic beta-actin promoter [T. A. Kost et al, Nucl. Acids Res., 11(23):8287 (1983)]. Other suitable or desirable promoters can be selected by one of skill in the art.

[0340] The antigen cassette can also include nucleic acid sequences heterologous to the viral vector sequences including sequences providing signals for efficient polyadenylation of the transcript (poly(A), poly-A or pA) and introns with functional splice donor and acceptor sites. A common poly-A sequence which is employed in the exemplary vectors of this invention is that derived from the papovavirus SV-40. The poly-A sequence generally can be inserted in the cassette following the antigen-based sequences and before the viral vector sequences. A common intron sequence can also be derived from SV-40, and is referred to as the SV-40 T intron sequence. An antigen cassette can also contain such an intron, located between the promoter/enhancer sequence and the antigen(s). Selection of these and other common vector elements are conventional [see, e.g., Sambrook et al, “Molecular Cloning. A Laboratory Manual.”, 2d edit., Cold Spring Harbor Laboratory, New York (1989) and references cited therein] and many such sequences are available from commercial and industrial sources as well as from Genbank.

[0341] An antigen cassette can have one or more antigens. For example, a given cassette can include 1-10, 1-20, 1-30, 10-20, 15-25, 15-20, 1, 2, 3, 4, 5, 6, 7, 8, 9, 10, 11, 12, 13, 14, 15, 16, 17, 18, 19, 20, or more antigens. Antigens can be linked directly to one another. Antigens can also be linked to one another with linkers. Antigens can be in any orientation relative to one another including N to C or C to N.

[0342] As described elsewhere, the antigen cassette can be located in the site of any selected deletion in the viral vector backbone, such as the site of the E1 gene region deletion or E3 gene region deletion of a ChAd-based vector or the deleted structural proteins of a VEE backbone, among others which may be selected.

[0343] The antigen encoding sequence (e.g., cassette or one or more of the nucleic acid sequences encoding an immunogenic polypeptide in the cassette) can be described using the following formula to describe the ordered sequence of each element, from 5′ to 3′:

Pₐ-(L5_{b}-N_{c}-L3_{d})_{X}-(G5ₑ-U_{f})_{Y}-G3_{g}

wherein P comprises the second promoter nucleotide sequence, where a=0 or 1, where c=1, N comprises one of the coronavirus derived nucleic acid sequences described herein, optionally wherein each N encodes a polypeptide sequence as set forth in Table A, Table B, and/or Table C,L5 comprises the 5′ linker sequence, where b=0 or 1, L3 comprises the 3′ linker sequence, where d=0 or 1, G5 comprises one of the at least one nucleic acid sequences encoding a GPGPG amino acid linker (SEQ ID NO: 56), where e=0 or 1, G3 comprises one of the at least one nucleic acid sequences encoding a GPGPG amino acid linker (SEQ ID NO: 56), where g=0 or 1, U comprises one of the at least one MHC class II epitope-encoding nucleic acid sequence, where f=1, X=1 to 400, where for each X the corresponding Ne is a coronavirus derived nucleic acid sequence, and Y=0, 1, or 2, where for each Y the corresponding Uf is a (1) universal MHC class II epitope-encoding nucleic acid sequence, optionally wherein the at least one universal sequence comprises at least one of Tetanus toxoid and PADRE, or (2) a MHC class II coronavirus derived epitope-encoding nucleic acid sequence. In some aspects, for each X the corresponding Ne is a distinct coronavirus derived nucleic acid sequence. In some aspects, for each Y the corresponding Ur is a distinct universal MHC class II epitope-encoding nucleic acid sequence or a distinct MHC class II coronavirus derived epitope-encoding nucleic acid sequence. The above antigen encoding sequence formula in some instances only describes the portion of an antigen cassette encoding concatenated epitope sequences, such as concatenated T cell epitopes. For example, in cassettes encoding concatenated T cell epitopes and one or more full-length coronavirus proteins, the above antigen encoding sequence formula describes the concatenated T cell epitopes and separately the cassette encodes one or more full-length coronavirus proteins that are linked optionally using a multicistonic system, such as 2A ribosome skipping sequence elements (e.g., E2A, P2A, F2A, or T2A sequences), a Internal Ribosome Entry Site (IRES) sequence elements, and/or independently operably linked to a separate promoter.

[0344] In one example, elements present include where b=1, d=1, c=1, g=1, h=1, X=18, Y=2, and the vector backbone comprises a ChAdV68 vector, a=1, P is a CMV promoter, the at least one second poly(A) sequence is present, wherein the second poly(A) sequence is an exogenous poly(A) sequence to the vector backbone, and optionally wherein the exogenous poly(A) sequence comprises an SV40 poly(A) signal sequence or a BGH poly(A) signal sequence, and each N encodes a MHC class I epitope 7-15 amino acids in length, a MHC class II epitope, an epitope capable of stimulating a B cell response, or combinations thereof, L5 is a native 5′ linker sequence that encodes a native N-terminal amino acid sequence of the epitope, and wherein the 5′ linker sequence encodes a peptide that is at least 3 amino acids in length, L3 is a native 3′ linker sequence that encodes a native C-terminal amino acid sequence of the epitope, and wherein the 3′ linker sequence encodes a peptide that is at least 3 amino acids in length, and U is each of a PADRE class II sequence and a Tetanus toxoid MHC class II sequence. The above antigen encoding sequence formula in some instances only describes the portion of an antigen cassette encoding concatenated epitope sequences, such as concatenated T cell epitopes.

[0345] In one example, elements present include where b=1, d=1, c=1, g=1, h=1, X=18, Y=2, and the vector backbone comprises a Venezuelan equine encephalitis virus vector, a=0, and the antigen cassette is operably linked to an endogenous 26S promoter, and the at least one polyadenylation poly(A) sequence is a poly(A) sequence of at least 80 consecutive A nucleotides (SEQ ID NO: 27940) provided by the backbone, and each N encodes a MHC class I epitope 7-15 amino acids in length, a MHC class II epitope, an epitope capable of stimulating a B cell response, or combinations thereof, L5 is a native 5′ linker sequence that encodes a native N-terminal amino acid sequence of the epitope, and wherein the 5′ linker sequence encodes a peptide that is at least 3 amino acids in length, L3 is a native 3′ linker sequence that encodes a native C-terminal amino acid sequence of the epitope, and wherein the 3′ linker sequence encodes a peptide that is at least 3 amino acids in length, and U is each of a PADRE class II sequence and a Tetanus toxoid MHC class II sequence.

[0346] The antigen encoding sequence can be described using the following formula to describe the ordered sequence of each element, from 5′ to 3′:

(Pₐ-(L5_{b}-N_{c}-L3_{d})_{X})_{Z}-(P2ₕ-(G5ₑ-U_{f})_{Y}_{W}-G3_{g}

wherein P and P2 comprise promoter nucleotide sequences, N comprises one of the coronavirus derived nucleic acid sequences described herein (e.g., N encodes a polypeptide sequence as set forth in Table A, Table B, Table C, and/or Table 7), L5 comprises a 5′ linker sequence, L3 comprises a 3′ linker sequence, G5 comprises a nucleic acid sequences encoding an amino acid linker, G3 comprises one of the at least one nucleic acid sequences encoding an amino acid linker, U comprises an MHC class II epitope-encoding nucleic acid sequence, where for each X the corresponding Nc is a coronavirus derived nucleic acid sequence, where for each Y the corresponding U_{f} is a (1) universal MHC class II epitope-encoding nucleic acid sequence, optionally wherein the at least one universal sequence comprises at least one of Tetanus toxoid and PADRE, or (2) a MHC class II coronavirus derived epitope-encoding nucleic acid sequence. The composition and ordered sequence can be further defined by selecting the number of elements present, for example where a=0 or 1, where b=0 or 1, where c=1, where d=0 or 1, where e=0 or 1, where f=1, where g=0 or 1, where h=0 or 1, X=1 to 400, Y=0, 1, 2, 3, 4 or 5, Z=1 to 400, and W=0, 1, 2, 3, 4 or 5.

[0347] In one example, elements present include where a=0, b=1, d=1, c=1, g=1, h=0, X=10, Y=2, Z=1, and W=1, describing where no additional promoter is present (e.g. only the promoter nucleotide sequence provided by the vector backbone, such as an RNA alphavirus backbone, is present), 10 epitopes are present, a 5′ linker is present for each N, a 3′ linker is present for each N, 2 MHC class II epitopes are present, a linker is present linking the two MHC class II epitopes, a linker is present linking the 5′ end of the two MHC class II epitopes to the 3′ linker of the final MHC class I epitope, and a linker is present linking the 3′ end of the two MHC class II epitopes to the to the vector backbone. Examples of linking the 3′ end of the antigen cassette to the vector backbone include linking directly to the 3′ UTR elements provided by the vector backbone, such as a 3′ 19-nt CSE. Examples of linking the 5′ end of the antigen cassette to the vector backbone include linking directly to a promoter or 5′ UTR element of the vector backbone, such as a 26S promoter sequence, an alphavirus 5′ UTR, a 51-nt CSE, or a 24-nt CSE of an alphavirus vector backbone.

[0348] Other examples include: where a=1 describing where a promoter other than the promoter nucleotide sequence provided by the vector backbone is present; where a=1 and Z is greater than 1 where multiple promoters other than the promoter nucleotide sequence provided by the vector backbone are present each driving expression of 1 or more distinct MHC class I epitope encoding nucleic acid sequences; where h=1 describing where a separate promoter is present to drive expression of the MHC class II epitope-encoding nucleic acid sequences; and where g=0 describing the MHC class II epitope-encoding nucleic acid sequence, if present, is directly linked to the vector backbone.

[0349] Other examples include where each MHC class I epitope that is present can have a 5′ linker, a 3′ linker, neither, or both. In examples where more than one MHC class I epitope is present in the same antigen cassette, some MHC class I epitopes may have both a 5′ linker and a 3′ linker, while other MHC class I epitopes may have either a 5′ linker, a 3′ linker, or neither. In other examples where more than one MHC class I epitope is present in the same antigen cassette, some MHC class I epitopes may have either a 5′ linker or a 3′ linker, while other MHC class I epitopes may have either a 5′ linker, a 3′ linker, or neither.

[0350] In examples where more than one MHC class II epitope is present in the same antigen cassette, some MHC class II epitopes may have both a 5′ linker and a 3′ linker, while other MHC class II epitopes may have either a 5′ linker, a 3′ linker, or neither. In other examples where more than one MHC class II epitope is present in the same antigen cassette, some MHC class II epitopes may have either a 5′ linker or a 3′ linker, while other MHC class II epitopes may have either a 5′ linker, a 3′ linker, or neither.

[0351] Other examples include where each antigen that is present can have a 5′ linker, a 3′ linker, neither, or both. In examples where more than one antigen is present in the same antigen cassette, some antigens may have both a 5′ linker and a 3′ linker, while other antigens may have either a 5′ linker, a 3′ linker, or neither. In other examples where more than one antigen is present in the same antigen cassette, some antigens may have either a 5′ linker or a 3′ linker, while other antigens may have either a 5′ linker, a 3′ linker, or neither.

[0352] The promoter nucleotide sequences P and/or P2 can be the same as a promoter nucleotide sequence provided by the vector backbone, such as a RNA alphavirus backbone. For example, the promoter sequence provided by the vector backbone, Pn and P2, can each comprise a 26S subgenomic promoter or a CMV promoter. The promoter nucleotide sequences P and/or P2 can be different from the promoter nucleotide sequence provided by the vector backbone, as well as can be different from each other.

[0353] The 5′ linker L5 can be a native sequence or a non-natural sequence. Non-natural sequence include, but are not limited to, AAY, RR, and DPP. The 3′ linker L3 can also be a native sequence or a non-natural sequence. Additionally, L5 and L3 can both be native sequences, both be non-natural sequences, or one can be native and the other non-natural. For each X, the amino acid linkers can be 2, 3, 4, 5, 6, 7, 8, 9, 10, 11, 12, 13, 14, 15, 16, 17, 18, 19, 20, 21, 22, 23, 24, 25, 26, 27, 28, 29, 30, 31, 32, 33, 34, 35, 36, 37, 38, 39, 40, 41, 42, 43, 44, 45, 46, 47, 48, 49, 50, 51, 52, 53, 54, 55, 56, 57, 58, 59, 60, 61, 62, 63, 64, 65, 66, 67, 68, 69, 70, 71, 72, 73, 74, 75, 76, 77, 78, 79, 80, 81, 82, 83, 84, 85, 86, 87, 88, 89, 90, 91, 92, 93, 94, 95, 96, 97, 98, 99, 100 or more amino acids in length. For each X, the amino acid linkers can be also be at least 3, at least 4, at least 5, at least 6, at least 7, at least 8, at least 9, at least 10, at least 11, at least 12, at least 13, at least 14, at least 15, at least 16, at least 17, at least 18, at least 19, at least 20, at least 21, at least 22, at least 23, at least 24, at least 25, at least 26, at least 27, at least 28, at least 29, or at least 30 amino acids in length.

[0354] The amino acid linker G5, for each Y, can be 2, 3, 4, 5, 6, 7, 8, 9, 10, 11, 12, 13, 14, 15, 16, 17, 18, 19, 20, 21, 22, 23, 24, 25, 26, 27, 28, 29, 30, 31, 32, 33, 34, 35, 36, 37, 38, 39, 40, 41, 42, 43, 44, 45, 46, 47, 48, 49, 50, 51, 52, 53, 54, 55, 56, 57, 58, 59, 60, 61, 62, 63, 64, 65, 66, 67, 68, 69, 70, 71, 72, 73, 74, 75, 76, 77, 78, 79, 80, 81, 82, 83, 84, 85, 86, 87, 88, 89, 90, 91, 92, 93, 94, 95, 96, 97, 98, 99, 100 or more amino acids in length. For each Y, the amino acid linkers can be also be at least 3, at least 4, at least 5, at least 6, at least 7, at least 8, at least 9, at least 10, at least 11, at least 12, at least 13, at least 14, at least 15, at least 16, at least 17, at least 18, at least 19, at least 20, at least 21, at least 22, at least 23, at least 24, at least 25, at least 26, at least 27, at least 28, at least 29, or at least 30 amino acids in length.

[0355] The amino acid linker G3 can be 2, 3, 4, 5, 6, 7, 8, 9, 10, 11, 12, 13, 14, 15, 16, 17, 18, 19, 20, 21, 22, 23, 24, 25, 26, 27, 28, 29, 30, 31, 32, 33, 34, 35, 36, 37, 38, 39, 40, 41, 42, 43, 44, 45, 46, 47, 48, 49, 50, 51, 52, 53, 54, 55, 56, 57, 58, 59, 60, 61, 62, 63, 64, 65, 66, 67, 68, 69, 70, 71, 72, 73, 74, 75, 76, 77, 78, 79, 80, 81, 82, 83, 84, 85, 86, 87, 88, 89, 90, 91, 92, 93, 94, 95, 96, 97, 98, 99, 100 or more amino acids in length. G3 can be also be at least 3, at least 4, at least 5, at least 6, at least 7, at least 8, at least 9, at least 10, at least 11, at least 12, at least 13, at least 14, at least 15, at least 16, at least 17, at least 18, at least 19, at least 20, at least 21, at least 22, at least 23, at least 24, at least 25, at least 26, at least 27, at least 28, at least 29, or at least 30 amino acids in length.

[0356] For each X, each N can encode a MHC class I epitope, a MHC class II epitope, an epitope capable of stimulating a B cell response, or a combination thereof. For each X, N can encode a combination of a MHC class I epitope, a MHC class II epitope, and an epitope capable of stimulating a B cell response. For each X, N can encode a combination of a MHC class I epitope and a MHC class II epitope. For each X, N can encode a combination of a MHC class I epitope and an epitope capable of stimulating a B cell response. For each X, N can encode a combination of a MHC class II epitope and an epitope capable of stimulating a B cell response. For each X, each N can encode a MHC class I epitope 7-15 amino acids in length. For each X, each N can also encodes a MHC class I epitope 5, 6, 7, 8, 9, 10, 11, 12, 13, 14, 15, 16, 17, 18, 19, 20, 21, 22, 23, 24, 25, 26, 27, 28, 29, or 30 amino acids in length. For each X, each N can also encodes a MHC class I epitope at least 5, at least 6, at least 7, at least 8, at least 9, at least 10, at least 11, at least 12, at least 13, at least 14, at least 15, at least 16, at least 17, at least 18, at least 19, at least 20, at least 21, at least 22, at least 23, at least 24, at least 25, at least 26, at least 27, at least 28, at least 29, or at least 30 amino acids in length. For each X, each N can encode a MHC class II epitope. For each X, each N can encode an epitope capable of stimulating a B cell response.

[0357] The cassette encoding the one or more antigens can be 700 nucleotides or less. The cassette encoding the one or more antigens can be 700 nucleotides or less and encode 2 distinct epitope-encoding nucleic acid sequences (e.g., encode 2 distinct coronavirus derived nucleic acid sequence encoding an immunogenic polypeptide). The cassette encoding the one or more antigens can be 700 nucleotides or less and encode at least 2 distinct epitope-encoding nucleic acid sequences. The cassette encoding the one or more antigens can be 700 nucleotides or less and encode 3 distinct epitope-encoding nucleic acid sequences. The cassette encoding the one or more antigens can be 700 nucleotides or less and encode at least 3 distinct epitope-encoding nucleic acid sequences. The cassette encoding the one or more antigens can be 700 nucleotides or less and include 1-10, 1-5, 1, 2, 3, 4, 5, 6, 7, 8, 9, 10, or more antigens.

[0358] The cassette encoding the one or more antigens can be between 375-700 nucleotides in length. The cassette encoding the one or more antigens can be between 375-700 nucleotides in length and encode 2 distinct epitope-encoding nucleic acid sequences. The cassette encoding the one or more antigens can be between 375-700 nucleotides in length and encode at least 2 distinct epitope-encoding nucleic acid sequences. The cassette encoding the one or more antigens can be between 375-700 nucleotides in length and encode 3 distinct epitope-encoding nucleic acid sequences. The cassette encoding the one or more antigens be between 375-700 nucleotides in length and encode at least 3 distinct epitope-encoding nucleic acid sequences. The cassette encoding the one or more antigens can be between 375-700 nucleotides in length and include 1-10, 1-5, 1, 2, 3, 4, 5, 6, 7, 8, 9, 10, or more antigens.

[0359] The cassette encoding the one or more antigens can be 600, 500, 400, 300, 200, or 100 nucleotides in length or less. The cassette encoding the one or more antigens can be 600, 500, 400, 300, 200, or 100 nucleotides in length or less and encode 2 distinct epitope-encoding nucleic acid sequences. The cassette encoding the one or more antigens can be 600, 500, 400, 300, 200, or 100 nucleotides in length or less and encode at least 2 distinct epitope-encoding nucleic acid sequences. The cassette encoding the one or more antigens can be 600, 500, 400, 300, 200, or 100 nucleotides in length or less and encode 3 distinct epitope-encoding nucleic acid sequences. The cassette encoding the one or more antigens can be 600, 500, 400, 300, 200, or 100 nucleotides in length or less and encode at least 3 distinct epitope-encoding nucleic acid sequences. The cassette encoding the one or more antigens can be 600, 500, 400, 300, 200, or 100 nucleotides in length or less and include 1-10, 1-5, 1, 2, 3, 4, 5, 6, 7, 8, 9, 10, or more antigens.

[0360] The cassette encoding the one or more antigens can be between 375-600, between 375-500, or between 375-400 nucleotides in length. The cassette encoding the one or more antigens can be between 375-600, between 375-500, or between 375-400 nucleotides in length and encode 2 distinct epitope-encoding nucleic acid sequences. The cassette encoding the one or more antigens can be between 375-600, between 375-500, or between 375-400 nucleotides in length and encode at least 2 distinct epitope-encoding nucleic acid sequences. The cassette encoding the one or more antigens can be between 375-600, between 375-500, or between 375-400 nucleotides in length and encode 3 distinct epitope-encoding nucleic acid sequences. The cassette encoding the one or more antigens can be between 375-600, between 375-500, or between 375-400 nucleotides in length and encode at least 3 distinct epitope-encoding nucleic acid sequences. The cassette encoding the one or more antigens can be between 375-600, between 375-500, or between 375-400 nucleotides in length and include 1-10, 1-5, 1, 2, 3, 4, 5, 6, 7, 8, 9, 10, or more antigens.

### V.B. Additional Considerations for Vaccine Design and Manufacture

[0361] After all of the above antigen filters are applied, more candidate antigens may still be available for vaccine inclusion than the vaccine technology can support. Additionally, uncertainty about various aspects of the antigen analysis may remain and tradeoffs may exist between different properties of candidate vaccine antigens. Thus, in place of predetermined filters at each step of the selection process, an integrated multi-dimensional model can be considered that places candidate antigens in a space with at least the following axes and optimizes selection using an integrative approach.
[0362] 1. Risk of auto-immunity or tolerance (risk of germline) (lower risk of auto-immunity is typically preferred)
[0363] 2. Probability of sequencing artifact (lower probability of artifact is typically preferred)
[0364] 3. Probability of immunogenicity (higher probability of immunogenicity is typically preferred)
[0365] 4. Probability of presentation (higher probability of presentation is typically preferred)
[0366] 5. Gene expression (higher expression is typically preferred)
[0367] 6. Coverage of HLA genes (larger number of HLA molecules involved in the presentation of a set of antigens may lower the probability that an infected cell will escape immune attack via downregulation or mutation of HLA molecules)
[0368] 7. Coverage of HLA classes (covering both HLA-I and HLA-II may increase the probability of therapeutic response and decrease the probability of infectious disease escape)

[0369] Additionally, optionally, antigens can be deprioritized (e.g., excluded) from the vaccination if they are predicted to be presented by HLA alleles lost or inactivated in either all or part of the patient's infected cell. HLA allele loss can occur by either somatic mutation, loss of heterozygosity, or homozygous deletion of the locus. Methods for detection of HLA allele somatic mutation are well known in the art, e.g. (Shukla et al., 2015). Methods for detection of somatic LOH and homozygous deletion (including for HLA locus) are likewise well described. (Carter et al., 2012; McGranahan et al., 2017; Van Loo et al., 2010). Antigens can also be deprioritized if mass-spectrometry data indicates a predicted antigen is not presented by a predicted HLA allele.

### V.C. Self-Amplifying RNA Vectors

[0370] In general, all self-amplifying RNA (SAM) vectors contain a self-amplifying backbone derived from a self-replicating virus. The term “self-amplifying backbone” refers to minimal sequence(s) of a self-replicating virus that allows for self-replication of the viral genome. For example, minimal sequences that allow for self-replication of an alphavirus can include conserved sequences for nonstructural protein-mediated amplification (e.g., a nonstructural protein 1 (nsP1) gene, a nsP2 gene, a nsP3 gene, a nsP4 gene, and/or a polyA sequence). A self-amplifying backbone can also include sequences for expression of subgenomic viral RNA (e.g., a 26S promoter element for an alphavirus). SAM vectors can be positive-sense RNA polynucleotides or negative-sense RNA polynucleotides, such as vectors with backbones derived from positive-sense or negative-sense self-replicating viruses. Self-replicating viruses include, but are not limited to, alphaviruses, flaviviruses (e.g., Kunjin virus), measles viruses, and rhabdoviruses (e.g., rabies virus and vesicular stomatitis virus). Examples of SAM vector systems derived from self-replicating viruses are described in greater detail in Lundstrom (Molecules. 2018 Dec. 13; 23(12). pii: E3310. doi: 10.3390/molecules23123310), herein incorporated by reference for all purposes.

### V.C.1. Alphavirus Biology

[0371] Alphaviruses are members of the family Togaviridae, and are positive-sense single stranded RNA viruses. Members are typically classified as either Old World, such as Sindbis, Ross River, Mayaro, Chikungunya, and Semliki Forest viruses, or New World, such as eastern equine encephalitis, Aura, Fort Morgan, or Venezuelan equine encephalitis virus and its derivative strain TC-83 (Strauss Microbrial Review 1994). A natural alphavirus genome is typically around 12 kb in length, the first two-thirds of which contain genes encoding non-structural proteins (nsPs) that form RNA replication complexes for self-replication of the viral genome, and the last third of which contains a subgenomic expression cassette encoding structural proteins for virion production (Frolov RNA 2001).

[0372] A model lifecycle of an alphavirus involves several distinct steps (Strauss Microbrial Review 1994, Jose Future Microbiol 2009). Following virus attachment to a host cell, the virion fuses with membranes within endocytic compartments resulting in the eventual release of genomic RNA into the cytosol. The genomic RNA, which is in a plus-strand orientation and comprises a 5′ methylguanylate cap and 3′ polyA tail, is translated to produce non-structural proteins nsP1-4 that form the replication complex. Early in infection, the plus-strand is then replicated by the complex into a minus-stand template. In the current model, the replication complex is further processed as infection progresses, with the resulting processed complex switching to transcription of the minus-strand into both full-length positive-strand genomic RNA, as well as the 26S subgenomic positive-strand RNA containing the structural genes. Several conserved sequence elements (CSEs) of alphavirus have been identified to potentially play a role in the various RNA replication steps including; a complement of the 5′ UTR in the replication of plus-strand RNAs from a minus-strand template, a 51-nt CSE in the replication of minus-strand synthesis from the genomic template, a 24-nt CSE in the junction region between the nsPs and the 26S RNA in the transcription of the subgenomic RNA from the minus-strand, and a 3′ 19-nt CSE in minus-strand synthesis from the plus-strand template.

[0373] Following the replication of the various RNA species, virus particles are then typically assembled in the natural lifecycle of the virus. The 26S RNA is translated and the resulting proteins further processed to produce the structural proteins including capsid protein, glycoproteins E1 and E2, and two small polypeptides E3 and 6K (Strauss 1994). Encapsidation of viral RNA occurs, with capsid proteins normally specific for only genomic RNA being packaged, followed by virion assembly and budding at the membrane surface.

### V.C.2. Alphavirus as a Delivery Vector

[0374] Alphaviruses (including alphavirus sequences, features, and other elements) can be used to generate alphavirus-based delivery vectors (also be referred to as alphavirus vectors, alphavirus viral vectors, alphavirus vaccine vectors, self-replicating RNA (srRNA) vectors, or self-amplifying RNA (samRNA) vectors). Alphaviruses have previously been engineered for use as expression vector systems (Pushko 1997, Rheme 2004). Alphaviruses offer several advantages, particularly in a vaccine setting where heterologous antigen expression can be desired. Due to its ability to self-replicate in the host cytosol, alphavirus vectors are generally able to produce high copy numbers of the expression cassette within a cell resulting in a high level of heterologous antigen production. Additionally, the vectors are generally transient, resulting in improved biosafety as well as reduced induction of immunological tolerance to the vector. The public, in general, also lacks pre-existing immunity to alphavirus vectors as compared to other standard viral vectors, such as human adenovirus. Alphavirus based vectors also generally result in cytotoxic responses to infected cells. Cytotoxicity, to a certain degree, can be important in a vaccine setting to properly illicit an immune response to the heterologous antigen expressed. However, the degree of desired cytotoxicity can be a balancing act, and thus several attenuated alphaviruses have been developed, including the TC-83 strain of VEE. Thus, an example of an antigen expression vector described herein can utilize an alphavirus backbone that allows for a high level of antigen expression, stimulates a robust immune response to antigen, does not stimulate an immune response to the vector itself, and can be used in a safe manner. Furthermore, the antigen expression cassette can be designed to stimulate different levels of an immune response through optimization of which alphavirus sequences the vector uses, including, but not limited to, sequences derived from VEE or its attenuated derivative TC-83.

[0375] Several expression vector design strategies have been engineered using alphavirus sequences (Pushko 1997). In one strategy, a alphavirus vector design includes inserting a second copy of the 26S promoter sequence elements downstream of the structural protein genes, followed by a heterologous gene (Frolov 1993). Thus, in addition to the natural non-structural and structural proteins, an additional subgenomic RNA is produced that expresses the heterologous protein. In this system, all the elements for production of infectious virions are present and, therefore, repeated rounds of infection of the expression vector in non-infected cells can occur.

[0376] Another expression vector design makes use of helper virus systems (Pushko 1997). In this strategy, the structural proteins are replaced by a heterologous gene. Thus, following self-replication of viral RNA mediated by still intact non-structural genes, the 26S subgenomic RNA provides for expression of the heterologous protein. Traditionally, additional vectors that expresses the structural proteins are then supplied in trans, such as by co-transfection of a cell line, to produce infectious virus. A system is described in detail in U.S. Pat. No. 8,093,021, which is herein incorporated by reference in its entirety, for all purposes. The helper vector system provides the benefit of limiting the possibility of forming infectious particles and, therefore, improves biosafety. In addition, the helper vector system reduces the total vector length, potentially improving the replication and expression efficiency. Thus, an example of an antigen expression vector described herein can utilize an alphavirus backbone wherein the structural proteins are replaced by an antigen cassette, the resulting vector both reducing biosafety concerns, while at the same time promoting efficient expression due to the reduction in overall expression vector size.

### V.C.3. Self-Amplifying Virus Production In Vitro

[0377] A convenient technique well-known in the art for RNA production is in vitro transcription (IVT). In this technique, a DNA template of the desired vector is first produced by techniques well-known to those in the art, including standard molecular biology techniques such as cloning, restriction digestion, ligation, gene synthesis, and polymerase chain reaction (PCR).

[0378] The DNA template contains a RNA polymerase promoter at the 5′ end of the sequence desired to be transcribed into RNA (e.g., SAM). Promoters include, but are not limited to, bacteriophage polymerase promoters such as T3, T7, K11, or SP6. Depending on the specific RNA polymerase promoter sequence chosen, additional 5′ nucleotides can transcribed in addition to the desired sequence. For example, the canonical T7 promoter can be referred to by the sequence TAATACGACTCACTATAGG (SEQ ID NO: 118), in which an IVT reaction using the DNA template TAATACGACTCACTATAGGN (SEQ ID NO: 119) for the production of desired sequence N will result in the mRNA sequence GG-N. In general, and without wishing to be bound by theory, T7 polymerase more efficiently transcribes RNA transcripts beginning with guanosine. In instances where additional 5′ nucleotides are not desired (e.g., no additional GG), the RNA polymerase promoter contained in the DNA template can be a sequence the results in transcripts containing only the 5′ nucleotides of the desired sequence, e.g., a SAM having the native 5′ sequence of the self-replicating virus from which the SAM vector is derived. For example, a minimal T7 promoter can be referred to by the sequence TAATACGACTCACTATA (SEQ ID NO: 120), in which an IVT reaction using the DNA template TAATACGACTCACTATAN (SEQ ID NO: 121) for the production of desired sequence N will result in the mRNA sequence N. Likewise, a minimal SP6 promoter referred to by the sequence ATTTAGGTGACACTATA (SEQ ID NO: 122) can be used to generate transcripts without additional 5′ nucleotides. In a typical IVT reaction, the DNA template is incubated with the appropriate RNA polymerase enzyme, buffer agents, and nucleotides (NTPs).

[0379] The resulting RNA polynucleotide can optionally be further modified including, but limited to, addition of a 5′ cap structure such as 7-methylguanosine or a related structure, and optionally modifying the 3′ end to include a polyadenylate (polyA) tail. In a modified IVT reaction, RNA is capped with a 5′ cap structure co-transcriptionally through the addition of cap analogues during IVT. Cap analogues can include dinucleotide (m⁷G-ppp-N) cap analogues or trinucleotide (m⁷G-ppp-N—N) cap analogues, where N represents a nucleotide or modified nucleotide (e.g., ribonucleosides including, but not limited to, adenosine, guanosine, cytidine, and uradine). Exemplary cap analogues and their use in IVT reactions are also described in greater detail in U.S. Pat. No. 10,519,189, herein incorporated by reference for all purposes. As discussed, T7 polymerase more efficiently transcribes RNA transcripts beginning with guanosine. To improve transcription efficiency in templates that do not begin with guanosine, a trinucleotide cap analogue (m⁷G-ppp-N—N) can be used. The trinucleotide cap analogue can increase transcription efficiency 2, 3, 4, 5, 6, 7, 8, 9, 10, 11, 12, 13, 14, 15, 16, 17, 18, 19, 20-fold or more relative to an IVT reaction using a dinucleotide cap analogue (m7G-ppp-N).

[0380] A 5′ cap structure can also be added following transcription, such as using a vaccinia capping system (e.g., NEB Cat. No. M2080) containing mRNA 2′-O-methyltransferase and S-Adenosyl methionine.

[0381] The resulting RNA polynucleotide can optionally be further modified separately from or in addition to the capping techniques described including, but limited to, modifying the 3′ end to include a polyadenylate (polyA) tail.

[0382] The RNA can then be purified using techniques well-known in the field, such as phenol-chloroform extraction.

### V.C.4. Delivery Via Lipid Nanoparticle

[0383] An important aspect to consider in vaccine vector design is immunity against the vector itself (Riley 2017). This may be in the form of preexisting immunity to the vector itself, such as with certain human adenovirus systems, or in the form of developing immunity to the vector following administration of the vaccine. The latter is an important consideration if multiple administrations of the same vaccine are performed, such as separate priming and boosting doses, or if the same vaccine vector system is to be used to deliver different antigen cassettes.

[0384] In the case of alphavirus vectors, the standard delivery method is the previously discussed helper virus system that provides capsid, E1, and E2 proteins in trans to produce infectious viral particles. However, it is important to note that the E1 and E2 proteins are often major targets of neutralizing antibodies (Strauss 1994). Thus, the efficacy of using alphavirus vectors to deliver antigens of interest to target cells may be reduced if infectious particles are targeted by neutralizing antibodies.

[0385] An alternative to viral particle mediated gene delivery is the use of nanomaterials to deliver expression vectors (Riley 2017). Nanomaterial vehicles, importantly, can be made of non-immunogenic materials and generally avoid stimulating immunity to the delivery vector itself. These materials can include, but are not limited to, lipids, inorganic nanomaterials, and other polymeric materials. Lipids can be cationic, anionic, or neutral. The materials can be synthetic or naturally derived, and in some instances biodegradable. Lipids can include fats, cholesterol, phospholipids, lipid conjugates including, but not limited to, polyethyleneglycol (PEG) conjugates (PEGylated lipids), waxes, oils, glycerides, and fat soluble vitamins.

[0386] Lipid nanoparticles (LNPs) are an attractive delivery system due to the amphiphilic nature of lipids enabling formation of membranes and vesicle like structures (Riley 2017). In general, these vesicles deliver the expression vector by absorbing into the membrane of target cells and releasing nucleic acid into the cytosol. In addition, LNPs can be further modified or functionalized to facilitate targeting of specific cell types. Another consideration in LNP design is the balance between targeting efficiency and cytotoxicity. Lipid compositions generally include defined mixtures of cationic, neutral, anionic, and amphipathic lipids. In some instances, specific lipids are included to prevent LNP aggregation, prevent lipid oxidation, or provide functional chemical groups that facilitate attachment of additional moieties. Lipid composition can influence overall LNP size and stability. In an example, the lipid composition comprises dilinoleylmethyl-4-dimethylaminobutyrate (MC3) or MC3-like molecules. MC3 and MC3-like lipid compositions can be formulated to include one or more other lipids, such as a PEG or PEG-conjugated lipid, a sterol, or neutral lipids.

[0387] Nucleic-acid vectors, such as expression vectors, exposed directly to serum can have several undesirable consequences, including degradation of the nucleic acid by serum nucleases or off-target stimulation of the immune system by the free nucleic acids. Therefore, encapsulation of the alphavirus vector can be used to avoid degradation, while also avoiding potential off-target effects. In certain examples, an alphavirus vector is fully encapsulated within the delivery vehicle, such as within the aqueous interior of an LNP. Encapsulation of the alphavirus vector within an LNP can be carried out by techniques well-known to those skilled in the art, such as microfluidic mixing and droplet generation carried out on a microfluidic droplet generating device. Such devices include, but are not limited to, standard T-junction devices or flow-focusing devices. In an example, the desired lipid formulation, such as MC3 or MC3-like containing compositions, is provided to the droplet generating device in parallel with the alphavirus delivery vector and other desired agents, such that the delivery vector and desired agents are fully encapsulated within the interior of the MC3 or MC3-like based LNP. In an example, the droplet generating device can control the size range and size distribution of the LNPs produced. For example, the LNP can have a size ranging from 1 to 1000 nanometers in diameter, e.g., 1, 10, 50, 100, 500, or 1000 nanometers. Following droplet generation, the delivery vehicles encapsulating the expression vectors can be further treated or modified to prepare them for administration.

### V.D. Chimpanzee Adenovirus (ChAd)

[0388] V.D.1. Viral Delivery with Chimpanzee Adenovirus

[0389] Vaccine compositions for delivery of one or more antigens (e.g., via an antigen cassette) can be created by providing adenovirus nucleotide sequences of chimpanzee origin, a variety of novel vectors, and cell lines expressing chimpanzee adenovirus genes. A nucleotide sequence of a chimpanzee C68 adenovirus (also referred to herein as ChAdV68) can be used in a vaccine composition for antigen delivery (See SEQ ID NO: 1). Use of C68 adenovirus derived vectors is described in further detail in U.S. Pat. No. 6,083,716, which is herein incorporated by reference in its entirety, for all purposes.

[0390] In a further aspect, provided herein is a recombinant adenovirus comprising the DNA sequence of a chimpanzee adenovirus such as C68 and an antigen cassette operatively linked to regulatory sequences directing its expression. The recombinant virus is capable of infecting a mammalian, preferably a human, cell and capable of expressing the antigen cassette product in the cell. In this vector, the native chimpanzee E1 gene, and/or E3 gene, and/or E4 gene can be deleted. An antigen cassette can be inserted into any of these sites of gene deletion. The antigen cassette can include an antigen against which a primed immune response is desired.

[0391] In another aspect, provided herein is a mammalian cell infected with a chimpanzee adenovirus such as C68.

[0392] In still a further aspect, a novel mammalian cell line is provided which expresses a chimpanzee adenovirus gene (e.g., from C68) or functional fragment thereof.

[0393] In still a further aspect, provided herein is a method for delivering an antigen cassette into a mammalian cell comprising the step of introducing into the cell an effective amount of a chimpanzee adenovirus, such as C68, that has been engineered to express the antigen cassette.

[0394] Still another aspect provides a method for stimulating an immune response in a mammalian host. The method can comprise the step of administering to the host an effective amount of a recombinant chimpanzee adenovirus, such as C68, comprising an antigen cassette that encodes one or more antigens from the infection against which the immune response is targeted.

[0395] Still another aspect provides a method for stimulating an immune response in a mammalian host to treat or prevent a disease in a subject, such as an infectious disease. The method can comprise the step of administering to the host an effective amount of a recombinant chimpanzee adenovirus, such as C68, comprising an antigen cassette that encodes one or more antigens, such as from the infectious disease against which the immune response is targeted.

[0396] Also disclosed is a non-simian mammalian cell that expresses a chimpanzee adenovirus gene obtained from the sequence of SEQ ID NO: 1. The gene can be selected from the group consisting of the adenovirus E1A, E1B, E2A, E2B, E3, E4, L1, L2, L3, L4 and L5 of SEQ ID NO: 1.

[0397] Also disclosed is a nucleic acid molecule comprising a chimpanzee adenovirus DNA sequence comprising a gene obtained from the sequence of SEQ ID NO: 1. The gene can be selected from the group consisting of said chimpanzee adenovirus E1A, E1B, E2A, E2B, E3, E4, L1, L2, L3, L4 and L5 genes of SEQ ID NO: 1. In some aspects the nucleic acid molecule comprises SEQ ID NO: 1. In some aspects the nucleic acid molecule comprises the sequence of SEQ ID NO: 1, lacking at least one gene selected from the group consisting of E1A, E1B, E2A, E2B, E3, E4, L1, L2, L3, L4 and L5 genes of SEQ ID NO: 1.

[0398] Also disclosed is a vector comprising a chimpanzee adenovirus DNA sequence obtained from SEQ ID NO: 1 and an antigen cassette operatively linked to one or more regulatory sequences which direct expression of the cassette in a heterologous host cell, optionally wherein the chimpanzee adenovirus DNA sequence comprises at least the cis-elements necessary for replication and virion encapsidation, the cis-elements flanking the antigen cassette and regulatory sequences. In some aspects, the chimpanzee adenovirus DNA sequence comprises a gene selected from the group consisting of E1A, E1B, E2A, E2B, E3, E4, L1, L2, L3, L4 and L5 gene sequences of SEQ ID NO: 1. In some aspects the vector can lack the E1A and/or E1B gene.

[0399] Also disclosed herein is a adenovirus vector comprising: a partially deleted E4 gene comprising a deleted or partially-deleted E4orf2 region and a deleted or partially-deleted E4orf3 region, and optionally a deleted or partially-deleted E4orf4 region. The partially deleted E4 can comprise an E4 deletion of at least nucleotides 34,916 to 35,642 of the sequence shown in SEQ ID NO:1, and wherein the vector comprises at least nucleotides 2 to 36,518 of the sequence set forth in SEQ ID NO:1. The partially deleted E4 can comprise an E4 deletion of at least a partial deletion of nucleotides 34,916 to 34,942 of the sequence shown in SEQ ID NO: 1, at least a partial deletion of nucleotides 34,952 to 35,305 of the sequence shown in SEQ ID NO:1, and at least a partial deletion of nucleotides 35,302 to 35,642 of the sequence shown in SEQ ID NO:1, and wherein the vector comprises at least nucleotides 2 to 36,518 of the sequence set forth in SEQ ID NO:1 The partially deleted E4 can comprise an E4 deletion of at least nucleotides 34,980 to 36,516 of the sequence shown in SEQ ID NO:1, and wherein the vector comprises at least nucleotides 2 to 36,518 of the sequence set forth in SEQ ID NO:1. The partially deleted E4 can comprise an E4 deletion of at least nucleotides 34,979 to 35,642 of the sequence shown in

[0400] SEQ ID NO: 1, and wherein the vector comprises at least nucleotides 2 to 36,518 of the sequence set forth in SEQ ID NO:1. The partially deleted E4 can comprise an E4 deletion of at least a partial deletion of E4Orf2, a fully deleted E4Orf3, and at least a partial deletion of E4Orf4. The partially deleted E4 can comprise an E4 deletion of at least a partial deletion of E4Orf2, at least a partial deletion of E4Orf3, and at least a partial deletion of E4Orf4. The partially deleted E4 can comprise an E4 deletion of at least a partial deletion of E4Orf1, a fully deleted E4Orf2, and at least a partial deletion of E4Orf3. The partially deleted E4 can comprise an E4 deletion of at least a partial deletion of E4Orf2 and at least a partial deletion of E4Orf3. The partially deleted E4 can comprise an E4 deletion between the start site of E4Orf1 to the start site of E4Orf5. The partially deleted E4 can be an E4 deletion adjacent to the start site of E4Orf1. The partially deleted E4 can be an E4 deletion adjacent to the start site of E4Orf2. The partially deleted E4 can be an E4 deletion adjacent to the start site of E4Orf3. The partially deleted E4 can be an E4 deletion adjacent to the start site of E4Orf4. The E4 deletion can be at least 50, at least 100, at least 200, at least 300, at least 400, at least 500, at least 600, at least 700, at least 800, at least 900, at least 1000, at least 1100, at least 1200, at least 1300, at least 1400, at least 1500, at least 1600, at least 1700, at least 1800, at least 1900, or at least 2000 nucleotides. The E4 deletion can be at least 700 nucleotides. The E4 deletion can be at least 1500 nucleotides. The E4 deletion can be 50 or less, 100 or less, 200 or less, 300 or less, 400 or less, 500 or less, 600 or less, 700 or less, 800 or less, 900 or less, 1000 or less, 1100 or less, 1200 or less, 1300 or less, 1400 or less, 1500 or less, 1600 or less, 1700 or less, 1800 or less, 1900 or less, or 2000 or less nucleotides. The E4 deletion can be 750 nucleotides or less. The E4 deletion can be at least 1550 nucleotides or less.

[0401] Also disclosed herein is a host cell transfected with a vector disclosed herein such as a C68 vector engineered to expression an antigen cassette. Also disclosed herein is a human cell that expresses a selected gene introduced therein through introduction of a vector disclosed herein into the cell.

[0402] Also disclosed herein is a method for delivering an antigen cassette to a mammalian cell comprising introducing into said cell an effective amount of a vector disclosed herein such as a C68 vector engineered to expression the antigen cassette.

[0403] Also disclosed herein is a method for producing an antigen comprising introducing a vector disclosed herein into a mammalian cell, culturing the cell under suitable conditions and producing the antigen.

### V.D.2. E1-Expressing Complementation Cell Lines

[0404] To generate recombinant chimpanzee adenoviruses (Ad) deleted in any of the genes described herein, the function of the deleted gene region, if essential to the replication and infectivity of the virus, can be supplied to the recombinant virus by a helper virus or cell line, i.e., a complementation or packaging cell line. For example, to generate a replication-defective chimpanzee adenovirus vector, a cell line can be used which expresses the E1 gene products of the human or chimpanzee adenovirus; such a cell line can include HEK293 or variants thereof. The protocol for the generation of the cell lines expressing the chimpanzee E1 gene products (Examples 3 and 4 of U.S. Pat. No. 6,083,716) can be followed to generate a cell line which expresses any selected chimpanzee adenovirus gene.

[0405] An AAV augmentation assay can be used to identify a chimpanzee adenovirus E1-expressing cell line. This assay is useful to identify E1 function in cell lines made by using the E1 genes of other uncharacterized adenoviruses, e.g., from other species. That assay is described in Example 4B of U.S. Pat. No. 6,083,716.

[0406] A selected chimpanzee adenovirus gene, e.g., E1, can be under the transcriptional control of a promoter for expression in a selected parent cell line. Inducible or constitutive promoters can be employed for this purpose. Among inducible promoters are included the sheep metallothionine promoter, inducible by zinc, or the mouse mammary tumor virus (MMTV) promoter, inducible by a glucocorticoid, particularly, dexamethasone. Other inducible promoters, such as those identified in International patent application WO95/13392, incorporated by reference herein can also be used in the production of packaging cell lines. Constitutive promoters in control of the expression of the chimpanzee adenovirus gene can be employed also.

[0407] A parent cell can be selected for the generation of a novel cell line expressing any desired C68 gene. Without limitation, such a parent cell line can be HeLa [ATCC Accession No. CCL 2], A549 [ATCC Accession No. CCL 185], KB [CCL 17], Detroit [e.g., Detroit 510, CCL 72] and WI-38 [CCL 75] cells. Other suitable parent cell lines can be obtained from other sources. Parent cell lines can include CHO, HEK293 or variants thereof, 911, HeLa, A549, LP-293, PER.C6, or AE1-2a.

[0408] An E1-expressing cell line can be useful in the generation of recombinant chimpanzee adenovirus E1 deleted vectors. Cell lines constructed using essentially the same procedures that express one or more other chimpanzee adenoviral gene products are useful in the generation of recombinant chimpanzee adenovirus vectors deleted in the genes that encode those products. Further, cell lines which express other human Ad E1 gene products are also useful in generating chimpanzee recombinant Ads.

### V.D.3. Recombinant Viral Particles as Vectors

[0409] The compositions disclosed herein can comprise viral vectors, that deliver at least one antigen to cells. Such vectors comprise a chimpanzee adenovirus DNA sequence such as C68 and an antigen cassette operatively linked to regulatory sequences which direct expression of the cassette. The C68 vector is capable of expressing the cassette in an infected mammalian cell. The C68 vector can be functionally deleted in one or more viral genes. An antigen cassette comprises at least one antigen under the control of one or more regulatory sequences such as a promoter. Optional helper viruses and/or packaging cell lines can supply to the chimpanzee viral vector any necessary products of deleted adenoviral genes.

[0410] The term “functionally deleted” means that a sufficient amount of the gene region is removed or otherwise altered, e.g., by mutation or modification, so that the gene region is no longer capable of producing one or more functional products of gene expression. Mutations or modifications that can result in functional deletions include, but are not limited to, nonsense mutations such as introduction of premature stop codons and removal of canonical and non-canonical start codons, mutations that alter mRNA splicing or other transcriptional processing, or combinations thereof. If desired, the entire gene region can be removed.

[0411] Modifications of the nucleic acid sequences forming the vectors disclosed herein, including sequence deletions, insertions, and other mutations may be generated using standard molecular biological techniques and are within the scope of this invention.

### V.D.4. Construction of the Viral Plasmid Vector

[0412] The chimpanzee adenovirus C68 vectors useful in this invention include recombinant, defective adenoviruses, that is, chimpanzee adenovirus sequences functionally deleted in the E1a or E1b genes, and optionally bearing other mutations, e.g., temperature-sensitive mutations or deletions in other genes. It is anticipated that these chimpanzee sequences are also useful in forming hybrid vectors from other adenovirus and/or adeno-associated virus sequences. Homologous adenovirus vectors prepared from human adenoviruses are described in the published literature [see, for example, Kozarsky I and II, cited above, and references cited therein, U.S. Pat. No. 5,240,846].

[0413] In the construction of useful chimpanzee adenovirus C68 vectors for delivery of an antigen cassette to a human (or other mammalian) cell, a range of adenovirus nucleic acid sequences can be employed in the vectors. A vector comprising minimal chimpanzee C68 adenovirus sequences can be used in conjunction with a helper virus to produce an infectious recombinant virus particle. The helper virus provides essential gene products required for viral infectivity and propagation of the minimal chimpanzee adenoviral vector. When only one or more selected deletions of chimpanzee adenovirus genes are made in an otherwise functional viral vector, the deleted gene products can be supplied in the viral vector production process by propagating the virus in a selected packaging cell line that provides the deleted gene functions in trans.

### V.D.5. Recombinant Minimal Adenovirus

[0414] A minimal chimpanzee Ad C68 virus is a viral particle containing just the adenovirus cis-elements necessary for replication and virion encapsidation. That is, the vector contains the cis-acting 5′ and 3′ inverted terminal repeat (ITR) sequences of the adenoviruses (which function as origins of replication) and the native 5′ packaging/enhancer domains (that contain sequences necessary for packaging linear Ad genomes and enhancer elements for the E1 promoter). See, for example, the techniques described for preparation of a “minimal” human Ad vector in International Patent Application WO96/13597 and incorporated herein by reference.

### V.D.6. Other Defective Adenoviruses

[0415] Recombinant, replication-deficient adenoviruses can also contain more than the minimal chimpanzee adenovirus sequences. These other Ad vectors can be characterized by deletions of various portions of gene regions of the virus, and infectious virus particles formed by the optional use of helper viruses and/or packaging cell lines.

[0416] As one example, suitable vectors may be formed by deleting all or a sufficient portion of the C68 adenoviral immediate early gene E1a and delayed early gene E1b, so as to eliminate their normal biological functions. Replication-defective E1-deleted viruses are capable of replicating and producing infectious virus when grown on a chimpanzee adenovirus-transformed, complementation cell line containing functional adenovirus E1a and E1b genes which provide the corresponding gene products in trans. Based on the homologies to known adenovirus sequences, it is anticipated that, as is true for the human recombinant E1-deleted adenoviruses of the art, the resulting recombinant chimpanzee adenovirus is capable of infecting many cell types and can express antigen(s), but cannot replicate in most cells that do not carry the chimpanzee E1 region DNA unless the cell is infected at a very high multiplicity of infection.

[0417] As another example, all or a portion of the C68 adenovirus delayed early gene E3 can be eliminated from the chimpanzee adenovirus sequence which forms a part of the recombinant virus.

[0418] Chimpanzee adenovirus C68 vectors can also be constructed having a deletion of the E4 gene. Still another vector can contain a deletion in the delayed early gene E2a.

[0419] Deletions can also be made in any of the late genes L1 through L5 of the chimpanzee C68 adenovirus genome. Similarly, deletions in the intermediate genes IX and IVa2 can be useful for some purposes. Other deletions may be made in the other structural or non-structural adenovirus genes.

[0420] The above discussed deletions can be used individually, i.e., an adenovirus sequence can contain deletions of E1 only. Alternatively, deletions of entire genes or portions thereof effective to destroy or reduce their biological activity can be used in any combination. For example, in one exemplary vector, the adenovirus C68 sequence can have deletions of the E1 genes and the E4 gene, or of the E1, E2a and E3 genes, or of the E1 and E3 genes, or of E1, E2a and E4 genes, with or without deletion of E3, and so on. As discussed above, such deletions can be used in combination with other mutations, such as temperature-sensitive mutations, to achieve a desired result.

[0421] The cassette comprising antigen(s) be inserted optionally into any deleted region of the chimpanzee C68 Ad virus. Alternatively, the cassette can be inserted into an existing gene region to disrupt the function of that region, if desired.

### V.D.7. Helper Viruses

[0422] Depending upon the chimpanzee adenovirus gene content of the viral vectors employed to carry the antigen cassette, a helper adenovirus or non-replicating virus fragment can be used to provide sufficient chimpanzee adenovirus gene sequences to produce an infective recombinant viral particle containing the cassette.

[0423] Useful helper viruses contain selected adenovirus gene sequences not present in the adenovirus vector construct and/or not expressed by the packaging cell line in which the vector is transfected. A helper virus can be replication-defective and contain a variety of adenovirus genes in addition to the sequences described above. The helper virus can be used in combination with the E1-expressing cell lines described herein.

[0424] For C68, the “helper” virus can be a fragment formed by clipping the C terminal end of the C68 genome with SspI, which removes about 1300 bp from the left end of the virus. This clipped virus is then co-transfected into an E1-expressing cell line with the plasmid DNA, thereby forming the recombinant virus by homologous recombination with the C68 sequences in the plasmid.

[0425] Helper viruses can also be formed into poly-cation conjugates as described in Wu et al, J. Biol. Chem., 264: 16985-16987 (1989); K. J. Fisher and J. M. Wilson, Biochem. J., 299:49 (Apr. 1, 1994). Helper virus can optionally contain a reporter gene. A number of such reporter genes are known to the art. The presence of a reporter gene on the helper virus which is different from the antigen cassette on the adenovirus vector allows both the Ad vector and the helper virus to be independently monitored. This second reporter is used to enable separation between the resulting recombinant virus and the helper virus upon purification.

### V.D.8. Assembly of Viral Particle and Infection of a Cell Line

[0426] Assembly of the selected DNA sequences of the adenovirus, the antigen cassette, and other vector elements into various intermediate plasmids and shuttle vectors, and the use of the plasmids and vectors to produce a recombinant viral particle can all be achieved using conventional techniques. Such techniques include conventional cloning techniques of cDNA, in vitro recombination techniques (e.g., Gibson assembly), use of overlapping oligonucleotide sequences of the adenovirus genomes, polymerase chain reaction, and any suitable method which provides the desired nucleotide sequence. Standard transfection and co-transfection techniques are employed, e.g., CaPO4 precipitation techniques or liposome-mediated transfection methods such as lipofectamine. Other conventional methods employed include homologous recombination of the viral genomes, plaguing of viruses in agar overlay, methods of measuring signal generation, and the like.

[0427] For example, following the construction and assembly of the desired antigen cassette-containing viral vector, the vector can be transfected in vitro in the presence of a helper virus into the packaging cell line. Homologous recombination occurs between the helper and the vector sequences, which permits the adenovirus-antigen sequences in the vector to be replicated and packaged into virion capsids, resulting in the recombinant viral vector particles.

[0428] The resulting recombinant chimpanzee C68 adenoviruses are useful in transferring an antigen cassette to a selected cell. In in vivo experiments with the recombinant virus grown in the packaging cell lines, the E1-deleted recombinant chimpanzee adenovirus demonstrates utility in transferring a cassette to a non-chimpanzee, preferably a human, cell.

### V.D.9. Use of the Recombinant Virus Vectors

[0429] The resulting recombinant chimpanzee C68 adenovirus containing the antigen cassette (produced by cooperation of the adenovirus vector and helper virus or adenoviral vector and packaging cell line, as described above) thus provides an efficient gene transfer vehicle which can deliver antigen(s) to a subject in vivo or ex vivo.

[0430] The above-described recombinant vectors are administered to humans according to published methods for gene therapy. A chimpanzee viral vector bearing an antigen cassette can be administered to a patient, preferably suspended in a biologically compatible solution or pharmaceutically acceptable delivery vehicle. A suitable vehicle includes sterile saline. Other aqueous and non-aqueous isotonic sterile injection solutions and aqueous and non-aqueous sterile suspensions known to be pharmaceutically acceptable carriers and well known to those of skill in the art may be employed for this purpose.

[0431] The chimpanzee adenoviral vectors are administered in sufficient amounts to transduce the human cells and to provide sufficient levels of antigen transfer and expression to provide a therapeutic benefit without undue adverse or with medically acceptable physiological effects, which can be determined by those skilled in the medical arts. Conventional and pharmaceutically acceptable routes of administration include, but are not limited to, direct delivery to the liver, intranasal, intravenous, intramuscular, subcutaneous, intradermal, oral and other parental routes of administration. Routes of administration may be combined, if desired.

[0432] Dosages of the viral vector will depend primarily on factors such as the condition being treated, the age, weight and health of the patient, and may thus vary among patients. The dosage will be adjusted to balance the therapeutic benefit against any side effects and such dosages may vary depending upon the therapeutic application for which the recombinant vector is employed. The levels of expression of antigen(s) can be monitored to determine the frequency of dosage administration.

[0433] Recombinant, replication defective adenoviruses can be administered in a “pharmaceutically effective amount”, that is, an amount of recombinant adenovirus that is effective in a route of administration to transfect the desired cells and provide sufficient levels of expression of the selected gene to provide a vaccinal benefit, i.e., some measurable level of protective immunity. C68 vectors comprising an antigen cassette can be co-administered with adjuvant. Adjuvant can be separate from the vector (e.g., alum) or encoded within the vector, in particular if the adjuvant is a protein. Adjuvants are well known in the art.

[0434] Conventional and pharmaceutically acceptable routes of administration include, but are not limited to, intranasal, intramuscular, intratracheal, subcutaneous, intradermal, rectal, oral and other parental routes of administration. Routes of administration may be combined, if desired, or adjusted depending upon the immunogen or the disease. For example, in prophylaxis of rabies, the subcutaneous, intratracheal and intranasal routes are preferred. The route of administration primarily will depend on the nature of the disease being treated.

[0435] The levels of immunity to antigen(s) can be monitored to determine the need, if any, for boosters. Following an assessment of antibody titers in the serum, for example, optional booster immunizations may be desired

### VI. Therapeutic and Manufacturing Methods

[0436] Also provided is a method of inducing an infectious disease organism-specific (e.g. a coronavirus specific) immune response in a subject, vaccinating against an infectious disease organism, treating and/or alleviating a symptom of an infection associated with an infectious disease organism in a subject by administering to the subject one or more antigens such as a plurality of antigens identified using methods disclosed herein.

[0437] In some aspects, a subject has been diagnosed with an infection or is at risk of an infection (e.g. Covid-19 due to a coronavirus infection), such as age, geographical/travel, and/or work-related increased risk of or predisposition to an infection, or at risk to a seasonal and/or novel disease infection.

[0438] In some aspects, a subject is immunocompromised, such as diagnosed with and/or suspected of having cancer. A subject can include those treated with a therapy resulting in immunosuppression. For example, a subject can include those diagnosed with a hematopoietic malignancy and treated with a hematopoietic cell targeting therapy, such as a B cell malignancy treated with an anti-CD20 therapy (e.g., rituximab). In another example, a subject can include those diagnosed with multiple sclerosis [e.g., Relapsing-remitting multiple sclerosis (RRMS), Secondary-progressive multiple sclerosis (SPMS), or Primary-progressive multiple sclerosis (PPMS)] and treated with an anti-CD20 therapy.

[0439] An antigen can be administered in an amount sufficient to stimulate a CTL response. An antigen can be administered in an amount sufficient to stimulate a T cell response. An antigen can be administered in an amount sufficient to stimulate a B cell response.

[0440] An antigen can be administered alone or in combination with other therapeutic agents. Therapeutic agents can include those that target an infectious disease organism, such as an anti-viral or antibiotic agent.

[0441] The optimum amount of each antigen to be included in a vaccine composition and the optimum dosing regimen can be determined. For example, an antigen or its variant can be prepared for intravenous (i.v.) injection, sub-cutaneous (s.c.) injection, intradermal (i.d.) injection, intraperitoneal (i.p.) injection, intramuscular (i.m.) injection. Methods of injection include s.c., i.d., i.p., i.m., and i.v. Methods of DNA or RNA injection include i.d., i.m., s.c., i.p. and i.v. Other methods of administration of the vaccine composition are known to those skilled in the art.

[0442] A vaccine can be compiled so that the selection, number and/or amount of antigens present in the composition is/are tissue, infectious disease, and/or patient-specific. For instance, the exact selection of peptides can be guided by expression patterns of the parent proteins in a given tissue or guided by mutation or disease status of a patient. The selection can be dependent on the specific infectious disease (e.g. the specific coronavirus isolate the subject is infected with or at risk for infection by), the status of the disease, the goal of the vaccination (e.g., preventative or targeting an ongoing disease), earlier treatment regimens, the immune status of the patient, and, of course, the HLA-haplotype of the patient. Furthermore, a vaccine can contain individualized components, according to personal needs of the particular patient. Examples include varying the selection of antigens according to the expression of the antigen in the particular patient or adjustments for secondary treatments following a first round or scheme of treatment.

[0443] A patient can be identified for administration of an antigen vaccine through the use of various diagnostic methods, e.g., patient selection methods described further below. Patient selection can involve identifying mutations in, or expression patterns of, one or more genes. Patient selection can involve identifying the infectious disease of an ongoing infection (e.g. the presence of a coronavirus infection and/or the specific coronavirus isolate). Patient selection can involve identifying risk of an infection by an infectious disease. In some cases, patient selection involves identifying the haplotype of the patient. The various patient selection methods can be performed in parallel, e.g., a sequencing diagnostic can identify both the mutations and the haplotype of a patient. The various patient selection methods can be performed sequentially, e.g., one diagnostic test identifies the mutations and separate diagnostic test identifies the haplotype of a patient, and where each test can be the same (e.g., both high-throughput sequencing) or different (e.g., one high-throughput sequencing and the other Sanger sequencing) diagnostic methods.

[0444] For a composition to be used as a vaccine for an infectious disease, antigens with similar normal self-peptides that are expressed in high amounts in normal tissues can be avoided or be present in low amounts in a composition described herein. On the other hand, if it is known that the infected cell of a patient expresses high amounts of a certain antigen, the respective pharmaceutical composition for treatment of this infection can be present in high amounts and/or more than one antigen specific for this particularly antigen or pathway of this antigen can be included.

[0445] Compositions comprising an antigen can be administered to an individual already suffering from an infection. In therapeutic applications, compositions are administered to a patient in an amount sufficient to stimulate an effective CTL response to the infectious disease organism antigen and to cure or at least partially arrest symptoms and/or complications. An amount adequate to accomplish this is defined as “therapeutically effective dose.” Amounts effective for this use will depend on, e.g., the composition, the manner of administration, the stage and severity of the disease being treated, the weight and general state of health of the patient, and the judgment of the prescribing physician. It should be kept in mind that compositions can generally be employed in serious disease states, that is, life-threatening or potentially life threatening situations, especially when the infectious disease organism has induced organ damage and/or other immune pathology. In such cases, in view of the minimization of extraneous substances and the relative nontoxic nature of an antigen, it is possible and can be felt desirable by the treating physician to administer substantial excesses of these compositions.

[0446] For therapeutic use, administration can begin at the detection or treatment of an infection. This can be followed by boosting doses until at least symptoms are substantially abated and for a period thereafter.

[0447] The pharmaceutical compositions (e.g., vaccine compositions) for therapeutic treatment are intended for parenteral, topical, nasal, oral or local administration. A pharmaceutical compositions can be administered parenterally, e.g., intravenously, subcutaneously, intradermally, or intramuscularly. The compositions can be administered to target specific infected tissues and/or cells of a subject. Disclosed herein are compositions for parenteral administration which comprise a solution of the antigen and vaccine compositions are dissolved or suspended in an acceptable carrier, e.g., an aqueous carrier. A variety of aqueous carriers can be used, e.g., water, buffered water, 0.9% saline, 0.3% glycine, hyaluronic acid and the like. These compositions can be sterilized by conventional, well known sterilization techniques, or can be sterile filtered. The resulting aqueous solutions can be packaged for use as is, or lyophilized, the lyophilized preparation being combined with a sterile solution prior to administration. The compositions may contain pharmaceutically acceptable auxiliary substances as required to approximate physiological conditions, such as pH adjusting and buffering agents, tonicity adjusting agents, wetting agents and the like, for example, sodium acetate, sodium lactate, sodium chloride, potassium chloride, calcium chloride, sorbitan monolaurate, triethanolamine oleate, etc.

[0448] Antigens can also be administered via liposomes, which target them to a particular cells tissue, such as lymphoid tissue. Liposomes are also useful in increasing half-life. Liposomes include emulsions, foams, micelles, insoluble monolayers, liquid crystals, phospholipid dispersions, lamellar layers and the like. In these preparations the antigen to be delivered is incorporated as part of a liposome, alone or in conjunction with a molecule which binds to, e.g., a receptor prevalent among lymphoid cells, such as monoclonal antibodies which bind to the CD45 antigen, or with other therapeutic or immunogenic compositions. Thus, liposomes filled with a desired antigen can be directed to the site of lymphoid cells, where the liposomes then deliver the selected therapeutic/immunogenic compositions. Liposomes can be formed from standard vesicle-forming lipids, which generally include neutral and negatively charged phospholipids and a sterol, such as cholesterol. The selection of lipids is generally guided by consideration of, e.g., liposome size, acid lability and stability of the liposomes in the blood stream. A variety of methods are available for preparing liposomes, as described in, e.g., Szoka et al., Ann. Rev. Biophys. Bioeng. 9; 467 (1980), U.S. Pat. Nos. 4,235,871, 4,501,728, 4,501,728, 4,837,028, and 5,019,369.

[0449] For targeting to the immune cells, a ligand to be incorporated into the liposome can include, e.g., antibodies or fragments thereof specific for cell surface determinants of the desired immune system cells. A liposome suspension can be administered intravenously, locally, topically, etc. in a dose which varies according to, inter alia, the manner of administration, the peptide being delivered, and the stage of the disease being treated.

[0450] For therapeutic or immunization purposes, nucleic acids encoding a peptide and optionally one or more of the peptides described herein can also be administered to the patient. A number of methods are conveniently used to deliver the nucleic acids to the patient. For instance, the nucleic acid can be delivered directly, as “naked DNA”. This approach is described, for instance, in Wolff et al., Science 247: 1465-1468 (1990) as well as U.S. Pat. Nos. 5,580,859 and 5,589,466. The nucleic acids can also be administered using ballistic delivery as described, for instance, in U.S. Pat. No. 5,204,253. Particles comprised solely of DNA can be administered. Alternatively, DNA can be adhered to particles, such as gold particles. Approaches for delivering nucleic acid sequences can include viral vectors, mRNA vectors, and DNA vectors with or without electroporation.

[0451] The nucleic acids can also be delivered complexed to cationic compounds, such as cationic lipids. Lipid-mediated gene delivery methods are described, for instance, in 9618372WOAWO 96/18372; 9324640WOAWO 93/24640; Mannino & Gould-Fogerite, BioTechniques 6(7): 682-691 (1988); U.S. Pat. No. 5,279,833 Rose U.S. Pat. Nos. 5,279,833; 9,106,309WOAWO 91/06309; and Felgner et al., Proc. Natl. Acad. Sci. USA 84: 7413-7414 (1987).

[0452] Antigens can also be included in viral vector-based vaccine platforms, such as vaccinia, fowlpox, self-replicating alphavirus, marabavirus, adenovirus (See, e.g., Tatsis et al., Adenoviruses, Molecular Therapy (2004) 10, 616-629), or lentivirus, including but not limited to second, third or hybrid second/third generation lentivirus and recombinant lentivirus of any generation designed to target specific cell types or receptors (See, e.g., Hu et al., Immunization Delivered by Lentiviral Vectors for Cancer and Infectious Diseases, Immunol Rev. (2011) 239(1): 45-61, Sakuma et al., Lentiviral vectors: basic to translational, Biochem J. (2012) 443(3):603-18, Cooper et al., Rescue of splicing-mediated intron loss maximizes expression in lentiviral vectors containing the human ubiquitin C promoter, Nucl. Acids Res. (2015) 43 (1): 682-690, Zufferey et al., Self-Inactivating Lentivirus Vector for Safe and Efficient In Vivo Gene Delivery, J. Virol. (1998) 72 (12): 9873-9880). Dependent on the packaging capacity of the above mentioned viral vector-based vaccine platforms, this approach can deliver one or more nucleotide sequences that encode one or more antigen peptides. The sequences may be flanked by non-mutated sequences, may be separated by linkers or may be preceded with one or more sequences targeting a subcellular compartment (See, e.g., Gros et al., Prospective identification of neoantigen-specific lymphocytes in the peripheral blood of melanoma patients, Nat Med. (2016) 22 (4):433-8, Stronen et al., Targeting of cancer neoantigens with donor-derived T cell receptor repertoires, Science. (2016) 352 (6291): 1337-41, Lu et al., Efficient identification of mutated cancer antigens recognized by T cells associated with durable tumor regressions, Clin Cancer Res. (2014) 20(13):3401-10). Upon introduction into a host, infected cells express the antigens, and thereby stimulate a host immune (e.g., CTL) response against the peptide(s). Vaccinia vectors and methods useful in immunization protocols are described in, e.g., U.S. Pat. No. 4,722,848. Another vector is BCG (Bacille Calmette Guerin). BCG vectors are described in Stover et al. (Nature 351:456-460 (1991)). A wide variety of other vaccine vectors useful for therapeutic administration or immunization of antigens, e.g., Salmonella typhi vectors, and the like will be apparent to those skilled in the art from the description herein.

[0453] A means of administering nucleic acids uses minigene constructs encoding one or multiple epitopes. To create a DNA sequence encoding the selected CTL epitopes (minigene) for expression in human cells, the amino acid sequences of the epitopes are reverse translated. A human codon usage table is used to guide the codon choice for each amino acid. These epitope-encoding DNA sequences are directly adjoined, creating a continuous polypeptide sequence. To optimize expression and/or immunogenicity, additional elements can be incorporated into the minigene design. Examples of amino acid sequence that could be reverse translated and included in the minigene sequence include: helper T lymphocyte, epitopes, a leader (signal) sequence, and an endoplasmic reticulum retention signal. In addition, MHC presentation of CTL epitopes can be improved by including synthetic (e.g. poly-alanine) or naturally-occurring flanking sequences adjacent to the CTL epitopes. The minigene sequence is converted to DNA by assembling oligonucleotides that encode the plus and minus strands of the minigene. Overlapping oligonucleotides (30-100 bases long) are synthesized, phosphorylated, purified and annealed under appropriate conditions using well known techniques. The ends of the oligonucleotides are joined using T4 DNA ligase. This synthetic minigene, encoding the CTL epitope polypeptide, can then cloned into a desired expression vector.

[0454] Purified plasmid DNA can be prepared for injection using a variety of formulations. The simplest of these is reconstitution of lyophilized DNA in sterile phosphate-buffer saline (PBS). A variety of methods have been described, and new techniques can become available. As noted above, nucleic acids are conveniently formulated with cationic lipids. In addition, glycolipids, fusogenic liposomes, peptides and compounds referred to collectively as protective, interactive, non-condensing (PINC) could also be complexed to purified plasmid DNA to influence variables such as stability, intramuscular dispersion, or trafficking to specific organs or cell types.

[0455] Also disclosed is a method of manufacturing a vaccine, comprising performing the steps of a method disclosed herein; and producing a vaccine comprising a plurality of antigens or a subset of the plurality of antigens.

[0456] Antigens disclosed herein can be manufactured using methods known in the art. For example, a method of producing an antigen or a vector (e.g., a vector including at least one sequence encoding one or more antigens) disclosed herein can include culturing a host cell under conditions suitable for expressing the antigen or vector wherein the host cell comprises at least one polynucleotide encoding the antigen or vector, and purifying the antigen or vector. Standard purification methods include chromatographic techniques, electrophoretic, immunological, precipitation, dialysis, filtration, concentration, and chromatofocusing techniques.

[0457] Host cells can include a Chinese Hamster Ovary (CHO) cell, NS0 cell, yeast, or a HEK293 cell. Host cells can be transformed with one or more polynucleotides comprising at least one nucleic acid sequence that encodes an antigen or vector disclosed herein, optionally wherein the isolated polynucleotide further comprises a promoter sequence operably linked to the at least one nucleic acid sequence that encodes the antigen or vector. In certain embodiments the isolated polynucleotide can be cDNA.

### VII. Antigen Use and Administration

[0458] A vaccination protocol can be used to dose a subject with one or more antigens and/or epitopes. A priming vaccine and a boosting vaccine can be used to dose the subject.

[0459] The priming vaccine can be based on C68 (e.g., the sequences shown in SEQ ID NO:1 or 2) or srRNA (e.g., the sequences shown in SEQ ID NO:3 or 4) and the boosting vaccine can be based on C68 (e.g., the sequences shown in SEQ ID NO: 1 or 2) or srRNA (e.g., the sequences shown in SEQ ID NO:3 or 4). Each vector typically includes a cassette that includes antigens and/or epitopes. Cassettes can include about 20 epitopes (or antigens from which the epitopes are derived), separated by spacers such as the natural sequence that normally surrounds each epitope or other non-natural spacer sequences such as AAY. Cassettes can also include MHCII antigens/epitopes such a tetanus toxoid antigen and PADRE antigen, which can be considered universal class II antigens. Cassettes can also include a targeting sequence such as a ubiquitin targeting sequence.

[0460] A priming vaccine can be injected (e.g., intramuscularly) in a subject. Bilateral injections per dose can be used. For example, one or more injections of ChAdV68 (C68) can be used (e.g., total dose 1×10¹² viral particles); one or more injections of self-amplifying RNA (samRNA or SAM), such as a dose of 3 μg, 10 μg, 30 μg, 100 μg, or 300 μg RNA can be used. A SAM priming dose of 30 μg or less can be used. A SAM priming dose of 10 μg or less can be used. A SAM priming dose of 3 μg or less can be used. For ChAdV68 priming, 1×10¹² or less of viral particles can be administered. For ChAdV68 priming, 3×10¹¹ or less of the viral particles can be administered. For ChAdV68 priming, at least 1×10¹¹ of the viral particles can be administered. For ChAdV68 priming, between 1×10¹¹ and 1×10¹², between 3×10¹¹ and 1×10¹², or between 1×10¹¹ and 3×10¹¹ of the viral particles can be administered. For ChAdV68 priming, 1×10¹¹, 3×10¹¹, or 1×10¹² of the viral particles can be administered. For ChAdV68 priming, the viral particles can be at a concentration of at 5×10¹¹ vp/mL.

[0461] A vaccine boost (boosting vaccine) can be injected (e.g., intramuscularly) after prime vaccination. A boosting vaccine can be administered about every 1, 2, 3, 4, 5, 6, 7, 8, 9, or 10 weeks, e.g., every 4 weeks and/or 8 weeks after the prime. Bilateral injections per dose can be used. For example, one or more injections of ChAdV68 (C68) can be used (e.g., total dose 1×10¹² viral particles); one or more injections of self-amplifying RNA (samRNA or SAM), such as a dose of 3 μg, 10 μg, 30 μg, 100 μg, or 300 μg RNA can be used. A SAM boosting dose of 30 μg or less can be used. A SAM boosting dose of 10 μg or less can be used. A SAM boosting dose of 3 μg or less can be used. One or more injections of samRNA at a dose of 30 μg or less can be used. A dose of 30 μg or less can represent the total content of RNA/samRNA administered. A dose of 30 μg or less can represent the total content of RNA/samRNA administered and include only a single distinct samRNA construct. A SAM boost of between 10-30 μg, 10-100 μg, 10-300 μg, 30-100 μg, 30-300 μg, or 100-300 μg RNA can be administered. A SAM boost of between 10-500 μg, 10-1000 μg, 30-500 μg, 30-1000 μg, or 500-1000 μg RNA can be administered. A SAM boost of at least 400 μg, at least 500 μg, at least 600 μg, at least 700 μg, at least 800 μg, at least 900 μg, at least 1000 μg RNA can be administered. A SAM boost of 10 μg, 30 μg, 100 μg, or 300 μg RNA can be administered. A SAM boost of 300 μg RNA can be administered. A SAM boost of 100 μg RNA can be administered. A SAM boost of 30 μg RNA can be administered. A SAM boost of 10 μg RNA can be administered. A SAM boost of 3 μg RNA can be administered. A SAM boost of at least 300 μg RNA can be administered. A SAM boost of at least 100 μg RNA can be administered. A SAM boost of at least 30 μg RNA can be administered. A SAM boost of at least 10 μg RNA can be administered. A SAM boost of at least 3 μg RNA can be administered. A SAM boost of less than or equal to 300 μg RNA can be administered. A SAM boost of less than or equal to 100 μg RNA can be administered.

[0462] A dose of can represent the total content of RNA/samRNA administered. A dose of can represent the total content of RNA/samRNA administered and include only a single distinct samRNA construct.

[0463] Immune monitoring can be performed before, during, and/or after vaccine administration. Such monitoring can inform safety and efficacy, among other parameters.

[0464] To perform immune monitoring, PBMCs are commonly used. PBMCs can be isolated before prime vaccination, and after prime vaccination (e.g. 4 weeks and 8 weeks). PBMCs can be harvested just prior to boost vaccinations and after each boost vaccination (e.g. 4 weeks and 8 weeks).

[0465] T cell responses can be assessed as part of an immune monitoring protocol. For example, the ability of a vaccine composition described herein to stimulate an immune response can be monitored and/or assessed. As used herein, “stimulate an immune response” refers to any increase in a immune response, such as initiating an immune response (e.g., a priming vaccine stimulating the initiation of an immune response in a naïve subject) or enhancement of an immune response (e.g., a boosting vaccine stimulating the enhancement of an immune response in a subject having a pre-existing immune response to an antigen, such as a pre-existing immune response initiated by a priming vaccine). Enhancing an immune response can include stimulating an immune response in a convalescent subject (e.g., a boosting vaccine stimulating the enhancement of an immune response in a convalescent Covid-19 subject). A subject can include an HIV positive subject. T cell responses can be measured using one or more methods known in the art such as ELISpot, intracellular cytokine staining, cytokine secretion and cell surface capture, T cell proliferation, MHC multimer staining, or by cytotoxicity assay. T cell responses to epitopes encoded in vaccines can be monitored from PBMCs by measuring induction of cytokines, such as IFN-gamma, using an ELISpot assay. Specific CD4 or CD8 T cell responses to epitopes encoded in vaccines can be monitored from PBMCs by measuring induction of cytokines captured intracellularly or extracellularly, such as IFN-gamma, using flow cytometry. Specific CD4 or CD8 T cell responses to epitopes encoded in the vaccines can be monitored from PBMCs by measuring T cell populations expressing T cell receptors specific for epitope/MHC class I complexes using MHC multimer staining. Specific CD4 or CD8 T cell responses to epitopes encoded in the vaccines can be monitored from PBMCs by measuring the ex vivo expansion of T cell populations following 3H-thymidine, bromodeoxyuridine and carboxyfluoresceine-diacetate-succinimidylester (CFSE) incorporation. The antigen recognition capacity and lytic activity of PBMC-derived T cells that are specific for epitopes encoded in vaccines can be assessed functionally by chromium release assay or alternative colorimetric cytotoxicity assays.

[0466] B cell responses can be measured using one or more methods known in the art such as assays used to determine B cell differentiation (e.g., differentiation into plasma cells), B cell or plasma cell proliferation, B cell or plasma cell activation (e.g., upregulation of costimulatory markers such as CD80 or CD86), antibody class switching, and/or antibody production (e.g., an ELISA).

[0467] Pancorona vaccination methods can include administering RBD derived nucleic acid sequences that are encoded by a single antigen cassette (e.g., a multi-cistronic cassette). Pancorona vaccination methods can include administering RBD derived nucleic acid sequences that are encoded by separate polynucleotide sequences (e.g., where each RBD is encoded on a separate viral backbone), such as a “blended” vaccine strategy of administering multiple distinct vaccines each encoding a separate distinct RBD alone (e.g., separate administrations of each) or in combination (a single administration of a combination of distinct RBD-encoding delivery vectors). Pancorona vaccination methods can include administering RBD derived nucleic acid sequences, either encoded by a single antigen cassette (e.g., a multi-cistronic cassette) or as multiple distinct vaccines each encoding a separate distinct RBD alone, together with additional antigen-encoding nucleic acid sequences, such as encode a MHC class I epitope, a MHC class II epitope, an epitope capable of stimulating a B cell response, or a combination thereof. In an illustrative non-limiting example, pancorona vaccination methods can include administering a vaccine with RBD derived nucleic acid sequences encoded in a single antigen cassette together with a vaccine with a cassette encoding concatenated T cell epitopes (e.g., see Table 16A-D), either as separate administrations of each or co-formulated together as a combined single administration.

### VIII. Isolation and Detection of HLA Peptides

[0468] Isolation of HLA-peptide molecules was performed using classic immunoprecipitation (IP) methods after lysis and solubilization of the tissue sample (55-58). Examples and methods are described in more detail in international patent application publication WO/2018/208856, herein incorporated by reference, in its entirety, for all purposes.

### IX. Presentation Model

[0469] Presentation models can be used to identify likelihoods of peptide presentation in patients. Various presentation models are known to those skilled in the art, for example the presentation models described in more detail in U.S. Pat. No. 10,055,540, US Application Pub. No. US20200010849A1 and US20110293637, and international patent application publications WO/2018/195357, WO/2018/208856, and WO2016187508, each herein incorporated by reference, in their entirety, for all purposes.

### X. Training Module

[0470] Training modules can be used to construct one or more presentation models based on training data sets that generate likelihoods of whether peptide sequences will be presented by MHC alleles associated with the peptide sequences. Various training modules are known to those skilled in the art, for example the presentation models described in more detail in U.S. Pat. No. 10,055,540, US Application Pub. No. US20200010849A1, and international patent application publications WO/2018/195357 and WO/2018/208856, each herein incorporated by reference, in their entirety, for all purposes. A training module can construct a presentation model to predict presentation likelihoods of peptides on a per-allele basis. A training module can also construct a presentation model to predict presentation likelihoods of peptides in a multiple-allele setting where two or more MHC alleles are present.

### XI. Prediction Module

[0471] A prediction module can be used to receive sequence data and select candidate antigens in the sequence data using a presentation model. Specifically, the sequence data may be DNA sequences, RNA sequences, and/or protein sequences extracted from infected cells patients or infectious disease organisms themselves (e.g., coronavirus). A prediction module may identify candidate antigens that are pathogen-derived peptides (e.g., coronavirus derived), such as by comparing sequence data extracted from normal tissue cells of a patient with the sequence data extracted from infected cells of the patient to identify portions containing one or more infectious disease organism associated antigens. A prediction module may identify candidate antigens that are expressed in an infected cell or infected tissue in comparison to a normal cell or tissue by comparing sequence data extracted from normal tissue cells of a patient with the sequence data extracted from infected tissue cells of the patient to identify expressed candidate antigens (e.g., identifying expressed polynucleotides and/or polypeptides specific to an infectious disease).

[0472] A presentation module can apply one or more presentation model to processed peptide sequences to estimate presentation likelihoods of the peptide sequences. Specifically, the prediction module may select one or more candidate antigen peptide sequences that are likely to be presented on infected cell HLA molecules by applying presentation models to the candidate antigens. In one implementation, the presentation module selects candidate antigen sequences that have estimated presentation likelihoods above a predetermined threshold. In another implementation, the presentation model selects the N candidate antigen sequences that have the highest estimated presentation likelihoods (where N is generally the maximum number of epitopes that can be delivered in a vaccine). A vaccine including the selected candidate antigens for a given patient can be injected into the patient to stimulate immune responses.

### XI.B.Cassette Design Module

### XI.B.1 Overview

[0473] A cassette design module can be used to generate a vaccine cassette sequence based on selected candidate peptides for injection into a patient. For example, a cassette design module can be used to generate a sequence encoding concatenated epitope sequences, such as concatenated T cell epitopes. Various cassette design modules are known to those skilled in the art, for example the cassette design modules described in more detail in U.S. Pat. No. 10,055,540, US Application Pub. No. US20200010849A1, and international patent application publications WO/2018/195357 and WO/2018/208856, each herein incorporated by reference, in their entirety, for all purposes.

[0474] A set of therapeutic epitopes may be generated based on the selected peptides determined by a prediction module associated with presentation likelihoods above a predetermined threshold, where the presentation likelihoods are determined by the presentation models. However it is appreciated that in other embodiments, the set of therapeutic epitopes may be generated based on any one or more of a number of methods (alone or in combination), for example, based on binding affinity or predicted binding affinity to HLA class I or class II alleles of the patient, binding stability or predicted binding stability to HLA class I or class II alleles of the patient, random sampling, and the like.

[0475] Therapeutic epitopes may correspond to selected peptides themselves. Therapeutic epitopes may also include C- and/or N-terminal flanking sequences in addition to the selected peptides. N- and C-terminal flanking sequences can be the native N- and C-terminal flanking sequences of the therapeutic vaccine epitope in the context of its source protein. Therapeutic epitopes can represent a fixed-length epitope Therapeutic epitopes can represent a variable-length epitope, in which the length of the epitope can be varied depending on, for example, the length of the C- or N-flanking sequence. For example, the C-terminal flanking sequence and the N-terminal flanking sequence can each have varying lengths of 2-5 residues, resulting in 16 possible choices for the epitope.

[0476] A cassette design module can also generate cassette sequences by taking into account presentation of junction epitopes that span the junction between a pair of therapeutic epitopes in the cassette. Junction epitopes are novel non-self but irrelevant epitope sequences that arise in the cassette due to the process of concatenating therapeutic epitopes and linker sequences in the cassette. The novel sequences of junction epitopes are different from the therapeutic epitopes of the cassette themselves.

[0477] A cassette design module can generate a cassette sequence that reduces the likelihood that junction epitopes are presented in the patient. Specifically, when the cassette is injected into the patient, junction epitopes have the potential to be presented by HLA class I or HLA class II alleles of the patient, and stimulate a CD8 or CD4 T-cell response, respectively. Such reactions are often times undesirable because T-cells reactive to the junction epitopes have no therapeutic benefit, and may diminish the immune response to the selected therapeutic epitopes in the cassette by antigenic competition.⁷⁶

[0478] A cassette design module can iterate through one or more candidate cassettes, and determine a cassette sequence for which a presentation score of junction epitopes associated with that cassette sequence is below a numerical threshold. The junction epitope presentation score is a quantity associated with presentation likelihoods of the junction epitopes in the cassette, and a higher value of the junction epitope presentation score indicates a higher likelihood that junction epitopes of the cassette will be presented by HLA class I or HLA class II or both.

[0479] In one embodiment, a cassette design module may determine a cassette sequence associated with the lowest junction epitope presentation score among the candidate cassette sequences.

[0480] A cassette design module may iterate through one or more candidate cassette sequences, determine the junction epitope presentation score for the candidate cassettes, and identify an optimal cassette sequence associated with a junction epitope presentation score below the threshold.

[0481] A cassette design module may further check the one or more candidate cassette sequences to identify if any of the junction epitopes in the candidate cassette sequences are self-epitopes for a given patient for whom the vaccine is being designed. To accomplish this, the cassette design module checks the junction epitopes against a known database such as BLAST. In one embodiment, the cassette design module may be configured to design cassettes that avoid junction self-epitopes.

[0482] A cassette design module can perform a brute force approach and iterate through all or most possible candidate cassette sequences to select the sequence with the smallest junction epitope presentation score. However, the number of such candidate cassettes can be prohibitively large as the capacity of the vaccine increases. For example, for a vaccine capacity of 20 epitopes, the cassette design module has to iterate through ˜10¹⁸ possible candidate cassettes to determine the cassette with the lowest junction epitope presentation score. This determination may be computationally burdensome (in terms of computational processing resources required), and sometimes intractable, for the cassette design module to complete within a reasonable amount of time to generate the vaccine for the patient. Moreover, accounting for the possible junction epitopes for each candidate cassette can be even more burdensome. Thus, a cassette design module may select a cassette sequence based on ways of iterating through a number of candidate cassette sequences that are significantly smaller than the number of candidate cassette sequences for the brute force approach.

[0483] A cassette design module can generate a subset of randomly or at least pseudo-randomly generated candidate cassettes, and selects the candidate cassette associated with a junction epitope presentation score below a predetermined threshold as the cassette sequence. Additionally, the cassette design module may select the candidate cassette from the subset with the lowest junction epitope presentation score as the cassette sequence. For example, the cassette design module may generate a subset of ˜1 million candidate cassettes for a set of 20 selected epitopes, and select the candidate cassette with the smallest junction epitope presentation score. Although generating a subset of random cassette sequences and selecting a cassette sequence with a low junction epitope presentation score out of the subset may be sub-optimal relative to the brute force approach, it requires significantly less computational resources thereby making its implementation technically feasible. Further, performing the brute force method as opposed to this more efficient technique may only result in a minor or even negligible improvement in junction epitope presentation score, thus making it not worthwhile from a resource allocation perspective. A cassette design module can determine an improved cassette configuration by formulating the epitope sequence for the cassette as an asymmetric traveling salesman problem (TSP). Given a list of nodes and distances between each pair of nodes, the TSP determines a sequence of nodes associated with the shortest total distance to visit each node exactly once and return to the original node. For example, given cities A, B, and C with known distances between each other, the solution of the TSP generates a closed sequence of cities, for which the total distance traveled to visit each city exactly once is the smallest among possible routes. The asymmetric version of the TSP determines the optimal sequence of nodes when the distance between a pair of nodes are asymmetric. For example, the “distance” for traveling from node A to node B may be different from the “distance” for traveling from node B to node A. By solving for an improved optimal cassette using an asymmetric TSP, the cassette design module can find a cassette sequence that results in a reduced presentation score across the junctions between epitopes of the cassette. The solution of the asymmetric TSP indicates a sequence of therapeutic epitopes that correspond to the order in which the epitopes should be concatenated in a cassette to minimize the junction epitope presentation score across the junctions of the cassette. A cassette sequence determined through this approach can result in a sequence with significantly less presentation of junction epitopes while potentially requiring significantly less computational resources than the random sampling approach, especially when the number of generated candidate cassette sequences is large. Illustrative examples of different computational approaches and comparisons for optimizing cassette design are described in more detail in U.S. Pat. No. 10,055,540, US Application Pub. No. US20200010849A1, and international patent application publications WO/2018/195357 and WO/2018/208856, each herein incorporated by reference, in their entirety, for all purposes.

[0484] A cassette design module can also generate cassette sequences by taking into account additional protein sequences encoded in the vaccine. For example, a cassette design module used to generate a sequence encoding concatenated T cell epitopes can take into account T cell epitopes already encoded by additional protein sequences present in the vaccine (e.g., full-length protein sequences), such as by removing T cell epitopes already encoded by the additional protein sequences from the list of candidate sequences.

[0485] A cassette design module can also generate cassette sequences by taking into account the size of the sequences. Without wishing to be bound by theory, in general, increased cassette size can negatively impact vaccine aspects, such as vaccine production and/or vaccine efficacy. In one example, the cassette design module can take into account overlapping sequences, such as overlapping T cell epitope sequences. In general, a single sequence containing overlapping T cell epitope sequences (also referred to as a “frame”) is more efficient than separately linking individual T cell epitope sequences as it reduces the sequence size needed to encode the multiple peptides. Accordingly, in an illustrative example, a cassette design module used to generate a sequence encoding concatenated T cell epitopes can take into account the cost/benefit of extending a candidate T cell epitope to encode one or more additional T cell epitopes, such as determining the benefit gained in additional population coverage for an MHC presenting the additional T cell epitope versus the cost of increasing the size of the sequence.

[0486] A cassette design module can also generate cassette sequences by taking into account the magnitude of stimulation of an immune response generated by validated epitopes.

[0487] A cassette design module can also generate cassette sequences by taking into account presentation of encoded epitopes across a population, for example that at least one immunogenic epitope is presented by at least one HLA across a proportion of a population, for example by at least 85%, 90%, or 95% of a population (e.g., HLA-A, HLA-B and HLA-C genes over four major ethnic groups, namely European (EUR), African American (AFA), Asian and Pacific Islander (APA) and Hispanic (HIS)). As an illustrative non-limiting example, a cassette design module can also generate cassette sequences such that at least one HLA is present at least across 85%, 90%, or 95% of a population that presents at least one validated epitope or presents at least 4, 5, 6, or 7 predicted epitopes.

[0488] A cassette design module can also generate cassette sequences by taking into account other aspects that improve potential safety, such as limiting encoding or the potential to encode a functional protein, functional protein domain, functional protein subunit, or functional protein fragment potentially presenting a safety risk. In some cases, a cassette design module can limit sequence size of encoded peptides such that are less than 50%, less than 49%, less than 48%, less than 47%, less than 46%, less than 45%, less than 45%, less than 43%, less than 42%, less than 41%, less than 40%, less than 39%, less than 38%, less than 37%, less than 36%, less than 35%, less than 34%, or less than 33% of the translated, corresponding full-length protein. In some cases, a cassette design module can limit sequence size of encoded peptides such that a single contiguous sequence is less than 50% of the translated, corresponding full-length protein, but more than one sequence may be derived from the same translated, corresponding full-length protein and together encode more than 50%. In an illustrative example, if a single sequence containing overlapping T cell epitope sequences (“frame”) is larger than 50% of the translated, corresponding full-length protein, the frame can be split into multiple frames (e.g., f1, f2 etc.) such that each frame is less than 50% of the translated, corresponding full-length protein. A cassette design module can also limit sequence size of encoded peptides such that a single contiguous sequence is less than 49%, less than 48%, less than 47%, less than 46%, less than 45%, less than 45%, less than 43%, less than 42%, less than 41%, less than 40%, less than 39%, less than 38%, less than 37%, less than 36%, less than 35%, less than 34%, or less than 33% of the translated, corresponding full-length protein. Where multiple frames from the same gene are encoded, the multiple frames can have overlapping sequences with each other, in other words each separately encode the same sequence. Where multiple frames from the same gene are encoded, the two or more nucleic acid sequences derived from the same gene can be ordered such that a first nucleic acid sequence cannot be immediately followed by or linked to a second nucleic acid sequence if the second nucleic acid sequence follows, immediately or not, the first nucleic acid sequence in the corresponding gene. For example, if there are 3 frames within the same gene (f1,f2,f3 in increasing order of amino acid position):
[0489] The following cassette orderings are not allowed:
[0490] f1 immediately followed by f2
[0491] f2 immediately followed by f3
[0492] f1 immediately followed by f3
[0493] The following cassette orderings are allowed:
[0494] f3 immediately followed by f2
[0495] f2 immediately followed by f1

### XIII. Example Computer

[0496] A computer can be used for any of the computational methods described herein. One skilled in the art will recognize a computer can have different architectures. Examples of computers are known to those skilled in the art, for example the computers described in more detail in U.S. Pat. No. 10,055,540, US Application Pub. No. US20200010849A1, and international patent application publications WO/2018/195357 and WO/2018/208856, each herein incorporated by reference, in their entirety, for all purposes.

### XIV. Examples

[0497] Below are examples of specific embodiments for carrying out the present invention. The examples are offered for illustrative purposes only, and are not intended to limit the scope of the present invention in any way. Efforts have been made to ensure accuracy with respect to numbers used (e.g., amounts, temperatures, etc.), but some experimental error and deviation should, of course, be allowed for.

[0498] The practice of the present invention will employ, unless otherwise indicated, conventional methods of protein chemistry, biochemistry, recombinant DNA techniques and pharmacology, within the skill of the art. Such techniques are explained fully in the literature. See, e.g., T. E. Creighton, Proteins: Structures and Molecular Properties (W.H. Freeman and Company, 1993); A. L. Lehninger, Biochemistry (Worth Publishers, Inc., current addition); Sambrook, et al., Molecular Cloning: A Laboratory Manual (2nd Edition, 1989); Methods In Enzymology (S. Colowick and N. Kaplan eds., Academic Press, Inc.); Remington's Pharmaceutical Sciences, 18th Edition (Easton, Pennsylvania: Mack Publishing Company, 1990); Carey and Sundberg Advanced Organic Chemistry 3^{rd} Ed. (Plenum Press) Vols A and B(1992).

### XIV.A. SARS-COV-2 MHC Epitope Prediction and Vaccine Cassette Construction

[0499] The SARS-COV-2 belongs to the coronavirus family and its reference genome is a single-stranded RNA sequence of 29,903 base pairs. The genome contains at least 14 open reading frames (ORF) as shown in FIG. 1. Among the encoded genes, the essential genes are replicase ORF1ab, spike (S), envelope (E), membrane (M) and nucleocapsid (N). The replicase ORF1ab (position 266-21555) encode two proteins namely orf1a and orf1b, the latter is translated by a ribosomal frameshift by -1 at position 13468. The two proteins together contain 16 non-structure proteins (nsp1-nsp16), as depicted in FIG. 2, that is, the ORF1a and ORF1b are cleaved into 16 nsps. The spike protein is thought to bind to the ACE2 receptor of the human cell, allowing the virus to enter the human cell to use its replication machinery to produce and disseminate more copies of the virus.

[0500] Because RNA viruses are known to have high mutation rates, a large number of SARS-COV-2 genomes were analyzed to identify regions in the proteome that are variable. Over 8000 SARS-COV-2 complete genomes deposited into the GISAID database [www.gisaid.org] as of Apr. 19, 2020 were obtained. Pairwise global alignment of each of the genomes to the SARS-COV-2 reference genome (Genbank Accession number NC_045512; SEQ ID NO:76) was performed. Sequences on these genomes that are aligned to coding regions of the reference genome were specifically located the. These sequences were then translated to obtain the protein sequences of these SARS-COV-2. These protein sequences wee then aligned to the respective reference protein sequences to identify variants.

[0501] The analysis identified 20 sites on the protein sequences that have a variant rate greater than 1%. These sites are shown in Table 1. In selecting T-cell epitopes, candidate epitopes that cross these variable sites were excluded.

[0502] CD8+epitopes were predicted using our machine learning EDGE platform (see U.S. Pat. No. 10,055,540, herein incorporated by reference for all purposes), which was shown to be best-in-class [Bulik-Sullivan et al. (2018). Deep learning using tumor HLA peptide mass spectrometry datasets improves neoantigen identification. Nature Biotechnology 2018, 37(1), herein incorporated by reference for all purposes]. The model for predicting class I epitopes was recently trained on 507,502 peptides presented in Mass Spectrometry across 398 samples and covers 116 identified alleles, of which 112 alleles (Table 2, FIG. 7) are represented in the haplotype distribution dataset described below.

[0503] In order to generate a list of candidate CD8+ T-cell epitopes, the orf1ab protein was split at the cleavage sites shown in FIG. 2. Studies show that the spike protein harbors a furin-like cleavage motif at position 681-684, where the cleavage event occurs following position 684 [Wrapp et al. (2020). Cryo-EM structure of the 2019-nCOV spike in the prefusion conformation. Science, 367(6483), 1260-1263, Ou et al. (2020). Characterization of spike glycoprotein of SARS-COV-2 on virus entry and its immune cross-reactivity with SARS-COV. Nature Communications, 11(1), 1620]. The cleavage of the spike protein into SI and S2 is thought to facilitate the cell entry contributing to the transmissibility of the virus. Accordingly, the Spike protein was split at the furin cleavage site for generating candidate CD8+ T-cell epitopes. All 8-11mer peptides were then generated from the cleaved proteins and the other proteins, flanked by their native N-terminal and C-terminal 5-mers.

[0504] The EDGE machine learning model was run on these candidate epitopes for each HLA class I allele. That is, the presentation score of a candidate epitope is given an EDGE score for each HLA allele. Generally, the probability of a peptide being presented is influenced by the family of the protein containing the peptide, and the expression level of the protein. The EDGE model was also trained on human peptidome datasets. Given there is no equivalent protein family for SARS-COV-2, for predicting the presentation of a given Sar-COV-2 peptide, a random protein family was assigned to all peptides. Assigning the same protein family, albeit random, will have the same effect on all SARS-COV-2 peptides. A high level of expression was also used (tpm=10). A list of candidate epitopes with the EDGE score of 0.001 and above for an HLA allele are shown in Table A, as well as cognate HLA alleles with a predicted EDGE score greater than 0.001, with each cognate pairing ranked as H (EDGE score >0.1), M (EDGE score between 0.01 and 0.1), and L (EDGE score <0.01).

[0505] In order to account for the different levels of expression of SARS-COV-2 genes, the ratio of reported T-cell responses among genes from SARS-COV-2 genome [Li et al. (2008) T Cell Responses to Whole SARS Coronavirus in Humans. The Journal of Immunology, 181(8), 5490-5500] was used as a proxy for the ratio of gene expression levels. The score of all epitopes from a SARS-COV-2 gene was then scaled so that the ratio between the 99^{th} percentile of the epitopes in the selected gene and the 99^{th} percentile of the epitopes in the Spike gene followed the ratio reported in [Li et al. (2008). T Cell Responses to Whole SARS Coronavirus in Humans. The Journal of Immunology, 181(8), 5490-5500].

[0506] A set of candidate CD8+epitopes was then selected by choosing those with the scaled EDGE score greater than or equal to a threshold of t=0.01. The threshold was selected from analysis of an HIV LANL dataset (data not shown) so that PPV for T-cell epitopes estimated to be 0.2 and recall is 0.5. The set sequences that are >=90% homologous to known SARs-COV T-cell epitopes reported in IEDB [Vita et al. (2019). The Immune Epitope Database (IEDB): 2018 update. Nucleic Acids Research, 47(D1), D339-D343.] was also included similar to the approach described in Grifoni et al. [(2020). A Sequence Homology and Bioinformatic Approach Can Predict Candidate Targets for Immune Responses to SARS-COV-2. Cell Host & Microbe, 27(4), 671-680.c2].

[0507] The set of candidate epitopes excluded those sequences that contained at least one of the sites that have a variable rate greater than 0.01, as mentioned above and shown in Table 1.

[0508] In order to maximize the coverage of the vaccine over the world population, allele frequencies of HLA-A, HLA-B and HLA-C genes over four major ethnic groups, namely European (EUR), African American (AFA), Asian and Pacific Islander (APA) and Hispanic (HIS) were obtained from the publicly available National Marrow Donor Program dataset [bioinformatics.bethematchclinical.org/hla-resources/haplotype-frequencies/high-resolution-hla-alleles-and-haplotypes-in-the-us-population]. Simulations were then performed to estimate the frequencies of the haplotypes made up by combination of these HLA alleles.

[0509] Cassette optimization proceeded as follows:

### Epitope Selection Definitions

[0510] Candidate epitope set E: set of candidate CD8+epitopes with scaled EDGE score greater than or equal to a threshold of t=0.01
[0511] Population coverage criteria P: For each of the four ethnicity groups as described above (EUR/AFA/APA/HIS), 95% of the simulated people in that ethnic group have at least 30 candidate epitopes presented in their diplotype
[0512] Solution frame set F—all amino acid ranges in the current solution encapsulating the added candidate epitopes
   [0513] For each epitope added to the solution, the epitope and 5 flanking native amino acids on each end must be fully contained in a frame of F
   [0514] Each frame spans only protein region (including individual NSPs in orf1ab)

### Epitope Selection Method

[0515] Population coverage criteria P starts as calculated with all epitopes in the whole gene(s) initially added
[0516] If the population coverage criteria P is not satisfied, continually choose the amino acid frame f across SARS-COV-2 proteome that most efficiently maximizes progress to P
   [0517] Defined as the highest ratio of additional population coverage C/additional amino acid bases added AA. (C/AA).
   [0518] All candidate frames are either a new 25aa frame (AA=25), or can overlap with frames in the existing solution F—in which case it can add any amount less than 25aa (AA<25)
   [0519] Additional population coverage C is the increase in epitope count from E for haplotypes with <20 covered epitopes, weighted(multiplied) by the haplotype's population frequency summed across all four ethnic groups
   [0520] 20 epitopes per haplotype is determined (experimentally chosen) to be an efficient proxy towards reaching the overall coverage criteria of 30 candidate epitopes per diplotype
   [0521] Add f to solution frame set F. Remove from E, candidate epitopes within f.
[0522] After frames are chosen, create the final set F:
   [0523] First merge overlapping frames, yielding contiguous sequences (i.e. epitope “hotspots”)
   [0524] Next ensure all frames are less than 50% of that frame's overall gene size. If frames are larger than this size, divide them into smaller (potentially overlapping) frames that are each smaller than this requirement. Additional more stringent size limitations can be tested
[0525] To illustrates the marginal value of larger cassette sizes, frame selection can continue past when P is satisfied—but does not affect the composition of the chosen cassette for the criteria P.

### Cassette Ordering

[0526] The frames in solution frame set F are ordered to minimize the EDGE score of junction epitopes (unintended epitopes not part of the solution, created by adjacent frames). Successive frames within a gene are also forbidden to immediately follow each other in the cassette (intra-gene restriction). In other words, intra-gene restriction requires that if there are two or more SARS-COV-2 derived nucleic acid sequences encoding epitopes derived from the same SARS-COV-2 gene, the two sequences are ordered such that a first nucleic acid sequence cannot be immediately followed by or linked to a second nucleic acid sequence if the second nucleic acid sequence follows first nucleic acid sequence in the corresponding SARS-COV-2 gene. For example, if there are 3 frames within the same gene (f1,f2,f3 in increasing order of amino acid position)
[0527] The following cassette orderings are impossible:
   [0528] f1 immediately followed by f2
   [0529] f2 immediately followed by f3
   [0530] f1 immediately followed by f3
[0531] The following cassette orderings are possible:
   [0532] f3 immediately followed by f2
   [0533] f2 immediately followed by f1

### Cassette Ordering Method

[0534] Google optimization routing tools [developers.google.com/optimization/routing] are used to perform a traveling salesman optimization route, where the distance between each pair of frames in F is:
[0535] Infinite, if the frames are not allowed to follow each other in this order, according to the above intra-gene restriction
[0536] Otherwise the sum of junction epitope EDGE scores across all alleles, weighted by allele frequency in population

[0537] Route finding of the minimal path distance yields the optimal ordering of the frames in the cassette to minimize junctional epitopes and avoid successive frames within a gene.

### Results

[0538] The population coverage criteria P was calculated with all initial epitopes provided by the SARS-COV-2 Spike protein (SEQ ID NO:59) split into SI and S2. Applying the optimization algorithms above yielded a 594 amino acid cassette sequence having 18 epitope-encoding frames, as shown in Table 3A. Table C presents each of the additional epitopes contained in the cassette (not including the epitopes derived from the Spike protein). Empirically, the optimal frame set F was produced when the size threshold for all frames was set to less than 42% of that frame's overall gene size. The coverage of the designed cassette over four populations is shown in FIG. 5, with the first column providing the number of SARS-COV-2 epitopes predicted to be presented and the second column providing the expected number of presented epitopes, based on a 0.2 PPV. Each row shows the protection coverage of each population if a certain number of epitopes is used.

[0539] Potential HLA-DRB, HLA-DQ, and HLA-DP MHC class II epitopes from the SARS-COV-2 proteome were also predicted. The method described for generating candidate CD8/MHC class I epitopes was used to generate peptides with sizes between 9 and 20 amino acids. EDGE model was run for class II to compute EDGE score of each of these peptides against each identifiable allele (see, e.g., U.S. application Ser. No. 16/606,577 and international patent application PCT/US2020/021508, each herein incorporated by reference in their entirety for all purposes). The list of CD4 epitopes with EDGE score greater than 0.001 are presented in Table B, as well as cognate HLA alleles with a predicted EDGE score greater than 0.001, with each cognate pairing ranked as H (EDGE score >0.1), M (EDGE score between 0.01 and 0.1), and L (EDGE score <0.01). HLA-DQ and HLA-DP are referred to by their alpha and beta chains used in the analysis, while HLA-DR is referred to by its beta chain as the alpha chain is generally invariable in the human population, with HLA-DR peptide contact regions particularly invariant.

[0540] The peptides receiving a score of >0.02 contained in the optimized MHC I cassette frames determined above were then identified. The threshold of 0.02 was chosen because the model prediction has the PPV of 0.2 in predicting Mass Spectrometry data with prevalence ratio positive vs negatives of 1:100. FIG. 6A illustrates the number of predicted epitopes presented by each MHC class II allele examined. FIG. 6B shows the population coverage of MHC class II at the diploid level.

[0541] Additional cassettes are designed using the epitope prediction and frame ordering algorithms described above where the initial population coverage criteria P is calculated with all initial epitopes provided by SARS-COV-2 Membrane (SEQ ID NO:61), SARS-COV-2 Nucleocapsid (SEQ ID NO:62). SARS-COV-2 Envelope (SEQ ID NO:63), or combinations (including combinations with SARS-COV-2 spike) or sequence variants thereof.

TABLE 1
Identified SARS-CoV-2 Mutations (>1%)

| | | Reference | Alternate | Variable |
|---|---|---|---|---|
| Gene | Position | Amino Acid | Amino Acid | Rate |
| orf1ab | 265 | T | I | 0.12474 |
| orf1ab | 378 | V | I | 0.022349 |
| orf1ab | 392 | G | D | 0.015073 |
| orf1ab | 448 | D | deletion | 0.030146 |
| orf1ab | 739 | I | V | 0.011435 |
| orf1ab | 765 | P | S | 0.012474 |
| orf1ab | 876 | A | T | 0.015073 |
| orf1ab | 3353 | K | R | 0.023909 |
| orf1ab | 3606 | L | F | 0.130977 |
| orf1ab | 4715 | P | L | 0.448025 |
| orf1ab | 5828 | P | L | 0.193867 |
| orf1ab | 5865 | Y | C | 0.199584 |
| S | 614 | D | G | 0.439815 |
| ORF3a | 57 | Q | H | 0.150943 |
| ORF3a | 251 | G | V | 0.086003 |
| M | 3 | D | G | 0.013508 |
| M | 175 | T | M | 0.051416 |
| ORF8 | 84 | L | S | 0.267563 |
| N | 203 | R | K | 0.124507 |
| N | 204 | G | R | 0.124068 |

TABLE 2
List of Identifiable Class I alleles

HLA-A*01:01
HLA-A*02:01
HLA-A*02:02
HLA-A*02:03
HLA-A*02:04
HLA-A*02:05
HLA-A*02:06
HLA-A*02:07
HLA-A*02:11
HLA-A*03:01
HLA-A*03:02
HLA-A*11:01
HLA-A*11:02
HLA-A*23:01
HLA-A*24:02
HLA-A*24:07
HLA-A*25:01
HLA-A*26:01
HLA-A*26:02
HLA-A*26:03
HLA-A*29:01
HLA-A*29:02
HLA-A*30:01
HLA-A*30:02
HLA-A*31:01
HLA-A*32:01
HLA-A*33:01
HLA-A*33:03
HLA-A*34:01
HLA-A*34:02
HLA-A*36:01
HLA-A*66:01
HLA-A*68:01
HLA-A*68:02
HLA-A*74:01
HLA-B*07:02
HLA-B*07:04
HLA-B*07:05
HLA-B*08:01
HLA-B*13:01
HLA-B*13:02
HLA-B*14:01
HLA-B*14:02
HLA-B*15:01
HLA-B*15:02
HLA-B*15:03
HLA-B*15:10
HLA-B*15:11
HLA-B*15:13
HLA-B*18:01
HLA-B*27:02
HLA-B*27:05
HLA-B*35:01
HLA-B*35:02
HLA-B*35:03
HLA-B*35:08
HLA-B*35:12
HLA-B*37:01
HLA-B*38:01
HLA-B*38:02
HLA-B*39:01
HLA-B*39:06
HLA-B*40:01
HLA-B*40:02
HLA-B*40:06
HLA-B*41:02
HLA-B*42:01
HLA-B*44:02
HLA-B*44:03
HLA-B*44:05
HLA-B*45:01
HLA-B*46:01
HLA-B*48:01
HLA-B*49:01
HLA-B*50:01
HLA-B*51:01
HLA-B*52:01
HLA-B*53:01
HLA-B*54:01
HLA-B*55:01
HLA-B*55:02
HLA-B*56:01
HLA-B*57:01
HLA-B*57:03
HLA-B*58:01
HLA-B*58:02
HLA-C*01:02
HLA-C*02:02
HLA-C*03:02
HLA-C*03:03
HLA-C*03:04
HLA-C*04:01
HLA-C*04:03
HLA-C*05:01
HLA-C*06:02
HLA-C*07:01
HLA-C*07:02
HLA-C*07:04
HLA-C*07:27
HLA-C*08:01
HLA-C*08:02
HLA-C*08:03
HLA-C*12:02
HLA-C*12:03
HLA-C*12:05
HLA-C*14:02
HLA-C*14:03
HLA-C*15:02
HLA-C*15:05
HLA-C*16:01
HLA-C*16:04
HLA-C*17:01

TABLE 3A
Cassette Epitope Frames in Conjunction with Spike Protein

| | | | | Amino Acid |
|---|---|---|---|---|
| Frame | Gene | Gene Start | Gene End | Length |
| 1 | M | 172 | 204 | 33 |
| 2 | orf1ab | 4154 | 4178 | 25 |
| 3 | N | 301 | 345 | 45 |
| 4 | N | 151 | 175 | 25 |
| 5 | N | 71 | 95 | 25 |
| 6 | ORF3a | 106 | 130 | 25 |
| 7 | orf1ab | 4419 | 4443 | 25 |
| 8 | N | 259 | 283 | 25 |
| 9 | orf1ab | 5371 | 5395 | 25 |
| 10 | M | 85 | 140 | 56 |
| 11 | N | 352 | 393 | 42 |
| 12 | orf1ab | 2580 | 2604 | 25 |
| 13 | ORF3a | 1 | 47 | 47 |
| 14 | M | 34 | 60 | 27 |
| 15 | ORF3a | 53 | 86 | 34 |
| 16 | orf1ab | 2794 | 2818 | 25 |
| 17 | ORF3a | 199 | 255 | 57 |
| 18 | E | 44 | 71 | 28 |

### XIV.B. EDGE-Directed Vaccine Design

[0542] A series of vaccines against SARS-COV-2 were designed to produce a balanced immune response inducing both neutralizing antibodies (from B cells) as well as effector and memory CD8+ T cell responses for maximum efficacy. In general, neutralizing antibodies to viral surface proteins can serve to prevent viral entry into cells and virus epitope-specific CD8+ T cells kill virally-infected cells. In addition, vaccines against SARS-COV-2 were designed to maximize the coverage of the vaccine across the world population, i.e., target most individuals (e.g., >95%) receive a large number (e.g., >=30) of candidate CD8+epitopes across all major ancestry groups while minimizing our cassette sequence footprint.

### Antigens and Cassettes

[0543] Vaccines are constructed encoding the MHC epitope-encoding cassettes designed using the epitope prediction and frame ordering algorithms described above. An exemplary cassette (herein referred to as the Concatenated EDGE predicted SARS-COV-2 MHC Class I Epitope Cassette or EDGE Predicted Epitopes (EPE)) was generated where the initial population coverage criteria P was calculated with all initial epitopes provided by SARS-COV-2 Spike, as described above.

[0544] Vaccines are also designed encoding various full-length proteins, either alone or in combination, generally for the purposes of stimulating a B cell response. Full-length proteins include SARS-COV-2 Spike (SEQ ID NO:59), SARS-COV-2 Membrane (SEQ ID NO:61), SARS-COV-2 Nucleocapsid (SEQ ID NO:62), and SARS-COV-2 Envelope (SEQ ID NO:63), sequences of which are shown in Table 3B.

[0545] With respect to the Spike protein, initial analysis of prevalent SARS-COV-2 variants (as described above, see Table 1) identified a Spike protein variant present in almost 44% of genomes. Subsequent analysis of the over 8000 SARS-COV-2 complete genomes identified a dominant variant at position 614 where the wildtype amino acid aspartic (D) is mutated to glycine (G). The mutation, denoted as D614G, is found on 60.05% of genomes sequenced worldwide, and 70.46% and 58.49% of the sequences in Europe and North America, respectively (FIG. 4). Accordingly, Spike proteins are used that contain the prevalent D614G Spike variant, with reference to the reference Spike protein (SEQ ID NO:59). In addition, a modified Spike protein was engineered to bias the Spike protein to remain in a predominantly prefusion state, as the prefusion Spike state may be a better target for antibody-mediated neutralization of the virus. The following mutations were selected: R682V to disrupt the Furin cleavage site; R815N to disrupt cleavage site within S2, and K986P and V987P to interfere with the secondary structure of Spike. Accordingly, “modified” Spike proteins are used that contain one or more of the following mutations, with reference to the reference Spike protein (SEQ ID NO:59): a D614G mutation, a R682V mutation, a R815N mutation, a K986P mutation, or a V987P mutation. For reference, a modified Spike proving having all of the Spike mutations is shown in SEQ ID NO:60.

[0546] Various vaccine designs and their respective cassette nucleotide sequences are presented in more detail in Table 4. For SAM based vaccines, promoter and/or poly(A) signal sequences can be removed given cassettes are generally operably linked to the endogenous 26S promoter and poly(A) sequence provided by the vector backbone. Depending on the cassette features and configuration, translated proteins (e.g., those in Table 3B) may also include an additional sequence(s) related to the particular expression strategy, such as a 2A ribosome skipping sequence elements (or fragments thereof following translation) and additional 26S promoter sequences.

TABLE 3B
SARS-CoV-2 Proteins

| | | SEQ ID |
|---|---|---|
| Peptide | Amino Acid Sequence | NO: |
| Concatenated | TSRTLSYYKLGASQRVAGDSGFAAYSRYRIGNYCAAGTTQTACTDDN | 57 |
| EDGE predicted | ALAYYNTTKGGWPQIAQFAPSASAFFGMSRIGMEVTPSGTWLTYTGA | |
| SARS-CoV-2 | IKLDDKDPNPANNAAIVLQLPQGTTLPKGFYAEGGVPINTNSSPDDQI | |
| MHC Class I | GYYRRATRRIRLYLYALVYFLQSINFVRIIMRLWLCSTDVVYRAFDIY | |
| Epitope Cassette | NDKVAGFAKFLKTRQKRTATKAYNVTQAFGRRGPEQTQPYVCNAPG | |
| | CDVTDVTQLYLGGMSYYACLVGLMWLSYFIASFRLFARTRSMWSEN | |
| | PETNILLNVPLHGTILTRPLLESELVILLNKHIDAYKTFPPTEPKKDKKK | |
| | KADETQALPQRQKKQQTVTVGDSAEVAVKMFDAYVNTFSSTFNVM | |
| | DLFMRIFTIGTVTLKQGEIKDATPSDFVRATATIPIQASLPFGWLILLQF | |
| | AYANRNRFLYIIKLIFLWLLWPVLAVFQSASKIITLKKRWQLALSKGV | |
| | HFVCNLLLLHVMSKHTDFSSEIIGYKAIDGGVTRDCVVLHSYFTSDYY | |
| | QLYSTQLSTDTGVEHVTFFIYNKIVDEPEEHVQIHTIDGSSGVCNIVNV | |
| | SLVKPSFYVYSRVKNLNSSRVP | |
| Concatenated | MAGTSRTLSYYKLGASQRVAGDSGFAAYSRYRIGNYCAAGTTQTAC | 58 |
| EDGE predicted | TDDNALAYYNTTKGGWPQIAQFAPSASAFFGMSRIGMEVTPSGTWLT | |
| SARS-CoV-2 | YTGAIKLDDKDPNPANNAAIVLQLPQGTTLPKGFYAEGGVPINTNSSP | |
| MHC Class I | DDQIGYYRRATRRIRLYLYALVYFLQSINFVRIIMRLWLCSTDVVYRA | |
| Epitope Cassette | FDIYNDKVAGFAKFLKTRQKRTATKAYNVTQAFGRRGPEQTQPYVC | |
| with N-term | NAPGCDVTDVTQLYLGGMSYYACLVGLMWLSYFIASFRLFARTRSM | |
| leader (bold) and | WSFNPETNILLNVPLHGTILTRPLLESELVILLNKHIDAYKTFPPTEPKK | |
| C-term | DKKKKADETQALPQRQKKQQTVTVGDSAEVAVKMFDAYVNTFSSTF | |
| Universal MHC | NVMDLFMRIFTIGTVTLKQGEIKDATPSDFVRATATIPIQASLPFGWLI | |
| Class II with | LLQFAYANRNRFLYIIKLIFLWLLWPVLAVFQSASKIITLKKRWQLALS | |
| GPGPG linkers | KGVHFVCNLLLLHVMSKHTDFSSEIIGYKAIDGGVTRDCVVLHSYFTS | |
| (SEQ ID NO: | DYYQLYSTQLSTDTGVEHVTFFIYNKIVDEPEEHVQIHTIDGSSGVCNI | |
| 56) (bold italic) | VNVSLVKPSFYVYSRVKNLNSSRVPGPGPGAKFVAAWTLKAAAGPGP | |
| SARS-CoV-2 | GQYIKANSKFIGITELGPGPG | |
| Spike | MFVFLVLLPLVSSQCVNLTTRTQLPPAYTNSFTRGVYYPDKVFRSSVL | 59 |
| | HSTQDLFLPFFSNVTWFHAIHVSGTNGTKRFDNPVLPFNDGVYFASTE | |
| | KSNIIRGWIFGTTLDSKTQSLLIVNNATNVVIKVCEFQFCNDPFLGVYY | |
| | HKNNKSWMESEFRVYSSANNCTFEYVSQPFLMDLEGKQGNFKNLRE | |
| | FVFKNIDGYFKIYSKHTPINLVRDLPQGFSALEPLVDLPIGINITRFQTLL | |
| | ALHRSYLTPGDSSSGWTAGAAAYYVGYLQPRTFLLKYNENGTITDAV | |
| | DCALDPLSETKCTLKSFTVEKGIYQTSNFRVQPTESIVRFPNITNLCPFG | |
| | EVFNATRFASVYAWNRKRISNCVADYSVLYNSASFSTFKCYGVSPTK | |
| | LNDLCFTNVYADSFVIRGDEVRQIAPGQTGKIADYNYKLPDDFTGCVI | |
| | AWNSNNLDSKVGGNYNYLYRLFRKSNLKPFERDISTEIYQAGSTPCN | |
| | GVEGFNCYFPLQSYGFQPTNGVGYQPYRVVVLSFELLHAPATVCGPK | |
| | KSTNLVKNKCVNFNFNGLTGTGVLTESNKKFLPFQQFGRDIADTTDA | |
| | VRDPQTLEILDITPCSFGGVSVITPGTNTSNQVAVLYQDVNCTEVPVAI | |
| | HADQLTPTWRVYSTGSNVFQTRAGCLIGAEHVNNSYECDIPIGAGICA | |
| | SYQTQTNSPRRARSVASQSIIAYTMSLGAENSVAYSNNSIAIPTNFTISV | |
| | TTEILPVSMTKTSVDCTMYICGDSTECSNLLLQYGSFCTQLNRALTGIA | |
| | VEQDKNTQEVFAQVKQIYKTPPIKDFGGFNFSQILPDPSKPSKRSFIED | |
| | LLFNKVTLADAGFIKQYGDCLGDIAARDLICAQKENGLTVLPPLLTDE | |
| | MIAQYTSALLAGTITSGWTFGAGAALQIPFAMQMAYRENGIGVTQNV | |
| | LYENQKLIANQFNSAIGKIQDSLSSTASALGKLQDVVNQNAQALNTL | |
| | VKQLSSNFGAISSVLNDILSRLDKVEAEVQIDRLITGRLQSLQTYVTQQ | |
| | LIRAAEIRASANLAATKMSECVLGQSKRVDFCGKGYHLMSFPQSAPH | |
| | GVVFLHVTYVPAQEKNFTTAPAICHDGKAHFPREGVFVSNGTHWFVT | |
| | QRNFYEPQIITTDNTFVSGNCDVVIGIVNNTVYDPLQPELDSFKEELDK | |
| | YFKNHTSPDVDLGDISGINASVVNIQKEIDRLNEVAKNLNESLIDLQEL | |
| | GKYEQYIKWPWYIWLGFIAGLIAIVMVTIMLCCMTSCCSCLKGCCSC | |
| | GSCCKFDEDDSEPVLKGVKLHYT | |
| SARS-CoV-2 | MFVFLVLLPLVSSQCVNLTTRTQLPPAYTNSFTRGVYYPDKVFRSSVL | 60 |
| Modified Spike | HSTQDLFLPFFSNVTWFHAIHVSGTNGTKRFDNPVLPFNDGVYFASTE | |
| (Potential | KSNIIRGWIFGTTLDSKTQSLLIVNNATNVVIKVCEFQFCNDPFLGVYY | |
| mutations in | HKNNKSWMESEFRVYSSANNCTFEYVSQPFLMDLEGKQGNFKNLRE | |
| Bold italic | FVFKNIDGYFKIYSKHTPINLVRDLPQGFSALEPLVDLPIGINITRFQTLL | |
| lowercase. | ALHRSYLTPGDSSSGWTAGAAAYYVGYLQPRTFLLKYNENGTITDAV | |
| modifications | DCALDPLSETKCTLKSFTVEKGIYQTSNFRVQPTESIVRFPNITNLCPFG | |
| may be in | EVFNATRFASVYAWNRKRISNCVADYSVLYNSASFSTFKCYGVSPTK | |
| separate or | LNDLCFTNVYADSFVIRGDEVRQIAPGQTGKIADYNYKLPDDFTGCVI | |
| combined | AWNSNNLDSKVGGNYNYLYRLFRKSNLKPFERDISTEIYQAGSTPCN | |
| constructs) | GVEGFNCYFPLQSYGFQPTNGVGYQPYRVVVLSFELLHAPATVCGPK | |
| | KSTNLVKNKCVNFNFNGLTGTGVLTESNKKFLPFQQFGRDIADTTDA | |
| | VRDPQTLEILDITPCSFGGVSVITPGTNTSNQVAVLYQgVNCTEVPVAI | |
| | HADQLTPTWRVYSTGSNVFQTRAGCLIGAEHVNNSYECDIPIGAGICA | |
| | SYQTQTNSPvRARSVASQSIIAYTMSLGAENSVAYSNNSIAIPTNFTISV | |
| | TTEILPVSMTKTSVDCTMYICGDSTECSNLLLQYGSFCTQLNRALTGIA | |
| | VEQDKNTQEVFAQVKQIYKTPPIKDFGGFNFSQILPDPSKPSKnSFIEDL | |
| | LFNKVTLADAGFIKQYGDCLGDIAARDLICAQKFNGLTVLPPLLTDEM | |
| | IAQYTSALLAGTITSGWTFGAGAALQIPFAMQMAYRENGIGVTQNVL | |
| | YENQKLIANQFNSAIGKIQDSLSSTASALGKLQDVVNQNAQALNTLV | |
| | KQLSSNFGAISSVLNDILSRLDppEAEVQIDRLITGRLQSLQTYVTQQLI | |
| | RAAEIRASANLAATKMSECVLGQSKRVDFCGKGYHLMSFPQSAPHG | |
| | VVFLHVTYVPAQEKNFTTAPAICHDGKAHFPREGVFVSNGTHWFVTQ | |
| | RNFYEPQIITTDNTFVSGNCDVVIGIVNNTVYDPLQPELDSFKEELDKY | |
| | FKNHTSPDVDLGDISGINASVVNIQKEIDRLNEVAKNLNESLIDLQELG | |
| | KYEQYIKWPWYIWLGFIAGLIAIVMVTIMLCCMTSCCSCLKGCCSCGS | |
| | CCKFDEDDSEPVLKGVKLHYT | |
| SARS-CoV-2 | MADSNGTITVEELKKLLEQWNLVIGFLFLTWICLLQFAYANRNRFLYI | 61 |
| Membrane | IKLIFLWLLWPVTLACFVLAAVYRINWITGGIAIAMACLVGLMWLSYF | |
| | IASFRLFARTRSMWSFNPETNILLNVPLHGTILTRPLLESELVIGAVILR | |
| | GHLRIAGHHLGRCDIKDLPKEITVATSRTLSYYKLGASQRVAGDSGFA | |
| | AYSRYRIGNYKLNTDHSSSSDNIALLVQ | |
| SARS-CoV-2 | MSDNGPQNQRNAPRITFGGPSDSTGSNQNGERSGARSKQRRPQGLPN | 62 |
| Nucleocapsid | NTASWFTALTQHGKEDLKFPRGQGVPINTNSSPDDQIGYYRRATRRIR | |
| | GGDGKMKDLSPRWYFYYLGTGPEAGLPYGANKDGIIWVATEGALNT | |
| | PKDHIGTRNPANNAAIVLQLPQGTTLPKGFYAEGSRGGSQASSRSSSR | |
| | SRNSSRNSTPGSSRGTSPARMAGNGGDAALALLLLDRLNQLESKMSG | |
| | KGQQQQGQTVTKKSAAEASKKPRQKRTATKAYNVTQAFGRRGPEQT | |
| | QGNFGDQELIRQGTDYKHWPQIAQFAPSASAFFGMSRIGMEVTPSGT | |
| | WLTYTGAIKLDDKDPNFKDQVILLNKHIDAYKTFPPTEPKKDKKKKA | |
| | DETQALPQRQKKQQTVTLLPAADLDDFSKOLQQSMSSADSTQA | |
| SARS-CoV-2 | MYSFVSEETGTLIVNSVLLFLAFVVFLLVTLAILTALRLCAYCCNIVNV | 63 |
| Envelope | SLVKPSFYVYSRVKNLNSSRVPDLLV | |

TABLE 4
SARS-CoV-2 Vaccine Designs

| | SEQ |
|---|---|
| Vector Insert | ID NO: |
| EDGE Predicted Epitopes (EPE): Concatenated EDGE predicted | 64 |
| SARS-CoV-2 MHC Class I Epitope Cassette with 5′ expression | |
| leader (bold) and 3′ Universal MHC Class II with GPGPG | |
| linkers (SEQ ID NO: 56) (bold italic) | |
| CMV-EPE-BGH | 65 |
| CMV-Spike (IDT)-T2A-membrane protein-SV40 | 66 |
| CMV-Spike (IDT)-T2A-membrane protein-BGH | 67 |
| CMV-Spike (IDT)-SV40-CMV-EPE-BGH | 68 |
| CMV-Spike (IDT)-SV40 | 69 |
| CMV-Modified Spike (IDT)-SV40 | 70 |
| CMV-Spike (IDT)-T2A-Envelope-SV40-CMV-nucleocapsid- | 71 |
| T2A-membrane protein-SV40 | |
| CMV-Spike (IDT)-SV40 -CMV-nucleocapsid-T2A-membrane | 72 |
| protein-BGH | |
| CMV-Spike (IDT)-T2A-envelope protein-T2A-membrane | 73 |
| protein-SV40 | |
| CMV-Spike (IDT)-T2A-envelope protein-T2A-membrane | 74 |
| protein-SV40-CMV-EPE-BGH | |

### SAM Vectors

[0547] A RNA alphavirus backbone for the antigen expression system was generated from a self-replicating Venezuelan Equine Encephalitis (VEE) virus (Kinney, 1986. Virology 152: 400-413) by deleting the structural proteins of VEE located 3′ of the 26S sub-genomic promoter (VEE sequences 7544 to 11,175 deleted; numbering based on Kinney et al 1986; SEQ ID NO:6). To generate the self-amplifying mRNA (“SAM”) vector, the deleted sequences are replaced by antigen sequences. A representative SAM vector containing 20 model antigens is “VEE-MAG25mer” (SEQ ID NO:4). The vectors featuring the antigen cassettes described having the MAG25mer cassette can be replaced by the SARS-COV-2 cassettes and/or full-length proteins described herein.

### In Vitro Transcription to Generate SAM

[0548] For in vivo studies: SAM vectors were generated as “AU-SAM” vectors. A modified T7 RNA polymerase promoter (TAATACGACTCACTATA; SEQ ID NO: 120), which lacks the canonical 3′ dinucleotide GG, was added to the 5′ end of the SAM vector to generate the in vitro transcription template DNA (SEQ ID NO:77; 7544 to 11,175 deleted without an inserted antigen cassette). Reaction conditions are described below:
[0549] 1× transcription buffer (40 mM Tris-HCL [pH7.9], 10 mM dithiothreitol, 2 mM spermidine, 0.002% Triton X-100, and 27 mM magnesium chloride) using final concentrations of 1×T7 RNA polymerase mix (E2040S); 0.025 mg/mL DNA transcription template (linearized by restriction digest); 8 mM CleanCap Reagent AU (Cat. No. N-7114) and 10 mM each of ATP, cytidine triphosphate (CTP), GTP, and uridine triphosphate (UTP)
[0550] Transcription reactions were incubated at 37° C. for 2 hr and treated with final 2 U DNase I (AM2239)/0.001 mg DNA transcription template in DNase I buffer for 1 hr at 37° C.
[0551] SAM was purified by RNeasy Maxi (QIAGEN, 75162)

[0552] Alternatively to co-transcriptional addition of a 5′ cap structure, a 7-methylguanosine or a related 5′ cap structure can be enzymatically added following transcription using a vaccinia capping system (NEB Cat. No. M2080) containing mRNA 2′-O-methyltransferase and S-Adenosyl methionine.

### Adenoviral Vectors

[0553] A modified ChAdV68 vector (“chAd68-Empty-E4deleted” SEQ ID NO:75) for the antigen expression system was generated based on AC_000011.1 with E1 (nt 577 to 3403), E3 (nt 27,125-31,825), and E4 region (nt 34,916 to 35,642) sequences deleted and the corresponding ATCC VR-594 (Independently sequenced Full-Length VR-594 C68 SEQ ID NO:10) nucleotides substituted at five positions. The full-length ChAdV68 AC_000011.1 sequence with corresponding ATCC VR-594 nucleotides substituted at five positions is referred to as “ChAdV68.5WTnt” (SEQ ID NO:1). Antigen cassettes under the control of the CMV promoter/enhancer are inserted in place of deleted E1 sequences.

### Adenoviral Production in 293F Cells

[0554] ChAdV68 virus production are performed in 293F cells grown in 293 FreeStyle™ (ThermoFisher) media in an incubator at 8% C02. On the day of infection cells are diluted to 10⁶ cells per mL, with 98% viability and 400 mL are used per production run in IL Shake flasks (Corning). 4 mL of the tertiary viral stock with a target MOI of >3.3 is used per infection. The cells are incubated for 48-72h until the viability was <70% as measured by Trypan blue. The infected cells are then harvested by centrifugation, full speed bench top centrifuge and washed in 1×PBS, re-centrifuged and then re-suspended in 20 mL of 10 mM Tris pH7.4. The cell pellet is lysed by freeze thawing 3× and clarified by centrifugation at 4,300×g for 5 minutes.

### Adenoviral Purification by CsCl Centrifugation

[0555] Viral DNA is purified by CsCl centrifugation. Two discontinuous gradient runs are performed. The first to purify virus from cellular components and the second to further refine separation from cellular components and separate defective from infectious particles.

[0556] 10 mL of 1.2 (26.8g CsCl dissolved in 92 mL of 10 mM Tris pH 8.0) CsCl is added to polyallomer tubes. Then 8 mL of 1.4 CsCl (53g CsCl dissolved in 87 mL of 10 mM Tris pH 8.0) is carefully added using a pipette delivering to the bottom of the tube. The clarified virus is carefully layered on top of the 1.2 layer. If needed more 10 mM Tris is added to balance the tubes. The tubes are then placed in a SW-32Ti rotor and centrifuged for 2h 30 min at 10ºC. The tube are then removed to a laminar flow cabinet and the virus band pulled using an 18 gauge needle and a 10 ml syringe. Care is taken not to remove contaminating host cell DNA and protein. The band is then diluted at least 2× with 10 mM Tris pH 8.0 and layered as before on a discontinuous gradient as described above. The run is performed as described before except that this time the run is performed overnight. The next day the band is pulled with care to avoid pulling any of the defective particle band. The virus is then dialyzed using a Slide-a-Lyzer™ Cassette (Pierce) against ARM buffer (20 mM Tris pH 8.0, 25 mM NaCl, 2.5% Glycerol). This is performed 3×, 1 h per buffer exchange. The virus is then aliquoted for storage at −80° C.

### Adenoviral Viral Assays

[0557] VP concentration is performed by using an OD 260 assay based on the extinction coefficient of 1.1×10¹² viral particles (VP) is equivalent to an Absorbance value of 1 at OD260 nm. Two dilutions (1:5 and 1:10) of adenovirus are made in a viral lysis buffer (0.1% SDS, 10 mM Tris pH 7.4, 1 mM EDTA). OD is measured in duplicate at both dilutions and the VP concentration/mL is measured by multiplying the OD260 value X dilution factor X 1.1×10¹²VP.

[0558] An infectious unit (IU) titer is calculated by a limiting dilution assay of the viral stock. The virus is initially diluted 100× in DMEM/5% NS/1×PS and then subsequently diluted using 10-fold dilutions down to 1×10⁻⁷. 100 μL of these dilutions are then added to 293A cells that were seeded at least an hour before at 3e5 cells/well of a 24 well plate. This is performed in duplicate. Plates are incubated for 48h in a CO2 (5%) incubator at 37° C. The cells are then washed with 1×PBS and are then fixed with 100% cold methanol (−20° C.). The plates are then incubated at −20° C. for a minimum of 20 minutes. The wells are washed with 1×PBS then blocked in 1×PBS/0.1% BSA for 1 h at room temperature. A rabbit anti-Ad antibody (Abcam, Cambridge, MA) is added at 1:8,000 dilution in blocking buffer (0.25 ml per well) and incubated for 1 h at room temperature. The wells are washed 4× with 0.5 mL PBS per well. A HRP conjugated Goat anti-Rabbit antibody (Bethyl Labs, Montgomery Texas) diluted 1000× is added per well and incubated for 1 h prior to a final round of washing. 5 PBS washes are performed and the plates were developed using DAB (Diaminobenzidine tetrahydrochloride) substrate in Tris buffered saline (0.67 mg/mL DAB in 50 mM Tris pH 7.5, 150 mM NaCl) with 0.01% H₂O₂. Wells are developed for 5 min prior to counting. Cells are counted under a 10× objective using a dilution that gave between 4-40 stained cells per field of view. The field of view that is used was a 0.32 mm2 grid of which there are equivalent to 625 per field of view on a 24 well plate. The number of infectious viruses/mL can be determined by the number of stained cells per grid multiplied by the number of grids per field of view multiplied by a dilution factor 10. Similarly, when working with GFP expressing cells florescent can be used rather than capsid staining to determine the number of GFP expressing virions per mL.

### XIV.C. Spike Protein Sequence Optimization

[0559] Various sequence-optimized nucleotide sequences encoding the Spike protein were evaluated in ChAdV68 vaccine vectors.

### Sequence-Optimization of Spike Sequence

[0560] The Spike nucleotide sequence from Wuhan Hu/1 (SEQ ID NO:78) was sequence-optimized by substituting synonymous codons such that the amino acid sequence was unaffected. An IDT algorithm was used for enhanced expression in humans and for reduced complexity to aid synthesis (see, e.g., SEQ ID NOs:66-74). The Spike sequence was additionally sequence-optimized using two additional algorithms; (1) a single sequence (SEQ ID NO:87) generated using SGI DNA (La Jolla, CA); (2) 6 sequences designated CT1, CT20, CT56, CT83, CT131, and CT 199 (SEQ ID NOs:79-84) generated using COOL (COOL algorithm generates multiple sequences and 6 were selected). The sequences of each are presented in Table 5.

[0561] Splicing events were identified in cDNA from 293A cells infected with ChAdV68 viruses or transfected with ChAdV68 genomic DNA. Specifically, total RNA from 10e5-10e6 cells was purified using Qiagen's RNeasy columns. Residual DNA was removed by DNAse treatment, and cDNA was produced using SuperScriptIV reverse transcriptase (Thermo). Subsequently, primers specific for the 5′ UTR and 3′ UTR of the Gritstone ChAdV68 cassette were used to generate PCR products, analyzed by agarose gel electrophoresis, gel-purified, and Sanger-sequenced to identify regions deleted by splicing.

[0562] Splice donor sites were removed by site-directed mutagenesis disrupting the nucleotide sequence motif while not disturbing the amino acid sequence. Mutagenesis was accomplished by incorporating above mutations into PCR primers, amplifying several fragments in parallel, and running a Gibson assembly on the fragments (overlapping by 30-60 nt). Optimized clone CT1-2C (SEQ ID NO:85) had Sanger sequence-identified splice donor motifs at NT385 and NT539 mutated, and clone IDT-4C (SEQ ID NO:86) had Sanger sequence-identified splice donor motifs at NT385, NT539, and predicted donor motifs at NT2003, and NT2473 mutated. Additionally, a possible polyadenylation site AATAAA at nt 445 was mutated to AAcAAA in IDT-4C clone.

[0563] The sequences described are presented in Table 5.

TABLE 5
Sequence-optimized Spike Sequences

| | | SEQ |
|---|---|---|
| Spike | | ID |
| Sequence | Nucleic Acid Sequence | NO: |
| Spike Native; | atgtttgtttttcttgttttattgccactagtctctagtcagtgtgttaatcttacaaccagaactcaattaccccctgc | 78 |
| NC_045512.2 | atacactaattctttcacacgtggtgtttattaccctgacaaagttttcagatcctcagttttacattcaactcaggactt | |
| Severe acute | gttcttacctttcttttccaatgttacttggttccatgctatacatgtctctgggaccaatggtactaagaggtttgata | |
| respiratory | accctgtcctaccatttaatgatggtgtttattttgcttccactgagaagtctaacataataagaggctggatttttgg | |
| syndrome | tactactttagattcgaagacccagtccctacttattgttaataacgctactaatgttgttattaaagtctgtgaatttc | |
| coronavirus | aattttgtaatgatccatttttgggtgtttattaccacaaaaacaacaaaagttggatggaaagtgagttcagagttt | |
| 2 isolate | attctagtgcgaataattgcacttttgaatatgtctctcagccttttcttatggaccttgaaggaaaacagggtaattt | |
| Wuhan-Hu-1 | caaaaatcttagggaatttgtgtttaagaatattgatggttattttaaaatatattctaagcacacgcctattaatttag | |
| | tgcgtgatctccctcagggtttttcggctttagaaccattggtagatttgccaataggtattaacatcactaggtttca | |
| | aactttacttgctttacatagaagttatttgactcctggtgattcttcttcaggttggacagctggtgctgcagcttatt | |
| | atgtgggttatcttcaacctaggacttttctattaaaatataatgaaaatggaaccattacagatgctgtagactgtg | |
| | cacttgaccctctctcagaaacaaagtgtacgttgaaatccttcactgtagaaaaaggaatctatcaaacttctaa | |
| | ctttagagtccaaccaacagaatctattgttagatttcctaatattacaaacttgtgcccttttggtgaagtttttaacg | |
| | ccaccagatttgcatctgtttatgcttggaacaggaagagaatcagcaactgtgttgctgattattctgtcctatata | |
| | attccgcatcattttccacttttaagtgttatggagtgtctcctactaaattaaatgatctctgctttactaatgtctat | |
| | gcagattcatttgtaattagaggtgatgaagtcagacaaatcgctccagggcaaactggaaagattgctgattata | |
| | attataaattaccagatgattttacaggctgcgttatagcttggaattctaacaatcttgattctaaggttggtggtaa | |
| | ttataattacctgtatagattgtttaggaagtctaatctcaaaccttttgagagagatatttcaactgaaatctatcag | |
| | gccggtagcacaccttgtaatggtgttgaaggttttaattgttactttcctttacaatcatatggtttccaacccacta | |
| | atggtgttggttaccaaccatacagagtagtagtactttcttttgaacttctacatgcaccagcaactgtttgtggac | |
| | ctaaaaagtctactaatttggttaaaaacaaatgtgtcaatttcaacttcaatggtttaacaggcacaggtgttctta | |
| | ctgagtctaacaaaaagtttctgcctttccaacaatttggcagagacattgctgacactactgatgctgtccgtgat | |
| | ccacagacacttgagattcttgacattacaccatgttcttttggtggtgtcagtgttataacaccaggaacaaatac | |
| | ttctaaccaggttgctgttctttatcaggatgttaactgcacagaagtccctgttgctattcatgcagatcaacttact | |
| | cctacttggcgtgtttattctacaggttctaatgtttttcaaacacgtgcaggctgtttaataggggctgaacatgtc | |
| | aacaactcatatgagtgtgacatacccattggtgcaggtatatgcgctagttatcagactcagactaattctcctc | |
| | ggcgggcacgtagtgtagctagtcaatccatcattgcctacactatgtcacttggtgcagaaaattcagttgctta | |
| | ctctaataactctattgccatacccacaaattttactattagtgttaccacagaaattctaccagtgtctatgaccaa | |
| | gacatcagtagattgtacaatgtacatttgtggtgattcaactgaatgcagcaatcttttgttgcaatatggcagtttt | |
| | tgtacacaattaaaccgtgctttaactggaatagctgttgaacaagacaaaaacacccaagaagtttttgcacaa | |
| | gtcaaacaaatttacaaaacaccaccaattaaagattttggtggttttaatttttcacaaatattaccagatccatcaa | |
| | aaccaagcaagaggtcatttattgaagatctacttttcaacaaagtgacacttgcagatgctggcttcatcaaaca | |
| | atatggtgattgccttggtgatattgctgctagagacctcatttgtgcacaaaagtttaacggccttactgttttgcc | |
| | acctttgctcacagatgaaatgattgctcaatacacttctgcactgttagcgggtacaatcacttctggttggacctt | |
| | tggtgcaggtgctgcattacaaataccatttgctatgcaaatggcttataggtttaatggtattggagttacacaga | |
| | atgttctctatgagaaccaaaaattgattgccaaccaatttaatagtgctattggcaaaattcaagactcactttcttc | |
| | cacagcaagtgcacttggaaaacttcaagatgtggtcaaccaaaatgcacaagctttaaacacgcttgttaaac | |
| | aacttagctccaattttggtgcaatttcaagtgttttaaatgatatcctttcacgtcttgacaaagttgaggctgaagt | |
| | gcaaattgataggttgatcacaggcagacttcaaagtttgcagacatatgtgactcaacaattaattagagctgca | |
| | gaaatcagagcttctgctaatcttgctgctactaaaatgtcagagtgtgtacttggacaatcaaaaagagttgattt | |
| | ttgtggaaagggctatcatcttatgtccttccctcagtcagcacctcatggtgtagtcttcttgcatgtgacttatgtc | |
| | cctgcacaagaaaagaacttcacaactgctcctgccatttgtcatgatggaaaagcacactttcctcgtgaaggt | |
| | gtctttgtttcaaatggcacacactggtttgtaacacaaaggaatttttatgaaccacaaatcattactacagacaa | |
| | cacatttgtgtctggtaactgtgatgttgtaataggaattgtcaacaacacagtttatgatcctttgcaacctgaatta | |
| | gactcattcaaggaggagttagataaatattttaagaatcatacatcaccagatgttgatttaggtgacatctctgg | |
| | cattaatgcttcagttgtaaacattcaaaaagaaattgaccgcctcaatgaggttgccaagaatttaaatgaatctc | |
| | tcatcgatctccaagaacttggaaagtatgagcagtatataaaatggccatggtacatttggctaggttttatagct | |
| | ggcttgattgccatagtaatggtgacaattatgctttgctgtatgaccagttgctgtagttgtctcaagggctgttgtt | |
| | cttgtggatcctgctgcaaatttgatgaagacgactctgagccagtgctcaaaggagtcaaattacattacacata | |
| | a | |
| Spike CT1 | ATGTTTGTCTTCCTGGTCTTGCTGCCGCTGGTGAGCAGCCAGTGCG | 79 |
| Optimized | TGAATCTCACCACCCGCACCCAGCTTCCACCTGCCTACACTAACAG | |
| | CTTCACCCGAGGGGTGTATTACCCTGACAAGGTATTCCGGTCCTCC | |
| | GTCCTCCATAGCACGCAGGACCTTTTTCTGCCCTTCTTCTCAAATGT | |
| | GACATGGTTCCATGCCATTCACGTGAGCGGCACGAATGGAACGAA | |
| | GCGCTTTGATAACCCCGTGCTGCCTTTCAATGACGGCGTCTACTTC | |
| | GCCTCCACTGAAAAGTCAAACATCATCCGGGGCTGGATCTTTGGC | |
| | ACCACTCTTGATTCAAAGACCCAGTCACTGCTGATTGTGAACAATG | |
| | CTACAAACGTGGTTATCAAGGTGTGTGAGTTTCAGTTCTGTAACGA | |
| | TCCATTTTTGGGAGTGTACTACCACAAGAACAACAAGTCCTGGATG | |
| | GAGTCTGAGTTCAGAGTGTATAGCTCTGCTAACAACTGCACCTTCG | |
| | AGTACGTGTCCCAGCCTTTCCTTATGGACCTGGAAGGCAAACAGG | |
| | GCAATTTCAAAAACCTGAGAGAGTTCGTGTTTAAGAACATTGACG | |
| | GATACTTCAAAATTTATTCTAAGCACACACCAATTAACTTAGTGCG | |
| | GGACCTACCCCAAGGCTTTAGCGCCCTAGAGCCCCTGGTTGACCTG | |
| | CCCATTGGGATCAATATAACAAGGTTCCAAACTCTACTGGCTCTGC | |
| | ATAGAAGTTATCTGACCCCAGGAGACAGCTCTAGTGGTTGGACCG | |
| | CCGGCGCAGCAGCCTACTATGTCGGGTACTTACAGCCACGCACGTT | |
| | CCTTCTGAAGTACAATGAGAACGGGACAATCACTGACGCAGTAGA | |
| | CTGTGCACTGGACCCGCTAAGCGAGACTAAGTGCACACTTAAATC | |
| | CTTCACGGTGGAGAAAGGCATTTATCAGACCTCTAACTTCAGGGTG | |
| | CAGCCAACAGAAAGCATTGTGCGATTCCCAAATATTACTAATCTTT | |
| | GCCCTTTCGGGGAGGTCTTTAATGCAACTAGATTCGCATCAGTCTA | |
| | TGCGTGGAACCGCAAACGCATTTCCAATTGTGTCGCAGACTACTCA | |
| | GTGCTGTACAACTCTGCCTCTTTCAGTACGTTCAAGTGTTACGGAG | |
| | TGTCACCCACTAAACTGAACGACCTGTGCTTTACAAATGTCTACGC | |
| | TGACTCCTTCGTGATTAGGGGAGACGAGGTGAGACAAATTGCCCC | |
| | CGGACAGACTGGGAAGATTGCCGACTACAATTATAAGCTTCCTGA | |
| | TGATTTCACTGGCTGTGTTATTGCCTGGAATAGTAACAATCTGGAT | |
| | AGCAAGGTGGGAGGCAACTATAACTACTTATATCGACTGTTTAGG | |
| | AAGAGTAATCTGAAACCATTTGAGCGGGATATTTCCACAGAAATT | |
| | TACCAGGCCGGGAGCACACCATGTAATGGGGTGGAGGGATTTAAT | |
| | TGTTACTTCCCACTCCAGAGCTATGGTTTCCAACCCACCAATGGAG | |
| | TGGGTTACCAGCCCTATAGAGTCGTGGTGCTTAGTTTTGAGCTGCT | |
| | TCACGCCCCAGCAACCGTCTGCGGTCCCAAAAAGTCGACCAATCT | |
| | CGTGAAAAACAAATGCGTAAACTTCAACTTTAACGGCTTAACAGG | |
| | AACCGGCGTGCTCACCGAAAGCAACAAGAAATTCCTTCCATTTCA | |
| | GCAATTCGGAAGGGACATCGCCGACACAACAGACGCGGTGAGGG | |
| | ACCCACAGACTCTGGAGATACTGGACATCACTCCTTGTTCGTTTGG | |
| | GGGCGTCTCGGTCATCACACCCGGGACTAATACTAGTAATCAGGT | |
| | AGCAGTTTTATATCAAGGCGTCAACTGTACCGAAGTACCTGTGGCC | |
| | ATACACGCTGATCAGCTAACGCCAACATGGCGAGTCTATTCCACC | |
| | GGCTCTAACGTTTTTCAGACCAGGGCTGGGTGCCTGATAGGGGCA | |
| | GAGCACGTCAATAATTCCTATGAGTGTGATATCCCCATAGGTGCGG | |
| | GGATCTGTGCCAGCTATCAAACCCAAACCAATTCACCAAGGCGAG | |
| | CACGGTCTGTGGCTTCTCAGAGCATAATTGCATATACAATGTCACT | |
| | GGGCGCTGAGAATAGCGTTGCATACTCTAATAACAGCATAGCCAT | |
| | TCCCACGAACTTTACTATCAGTGTGACAACCGAAATATTGCCAGTT | |
| | TCGATGACCAAAACTAGCGTGGATTGCACGATGTACATCTGTGGA | |
| | GACTCTACCGAATGCAGCAATCTGCTATTACAATATGGCAGCTTCT | |
| | GTACACAGTTAAATCGAGCCTTGACAGGCATCGCAGTGGAACAGG | |
| | ACAAAAATACTCAAGAGGTGTTTGCACAGGTGAAGCAAATCTACA | |
| | AAACGCCCCCCATTAAAGATTTTGGCGGGTTCAATTTTTCACAAAT | |
| | TCTCCCCGACCCGTCTAAGCCGAGTAAGCGGTCCTTCATCGAAGAT | |
| | CTGCTCTTTAACAAAGTAACCCTCGCCGATGCCGGCTTTATTAAGC | |
| | AGTATGGCGACTGCCTGGGGGATATAGCCGCTCGTGACCTGATTTG | |
| | CGCCCAGAAGTTCAATGGTCTGACCGTGTTGCCTCCTTTATTGACC | |
| | GATGAAATGATTGCCCAGTACACTAGTGCCCTGCTGGCCGGCACT | |
| | ATCACGTCTGGGTGGACCTTCGGAGCTGGTGCCGCCTTGCAGATAC | |
| | CTTTTGCAATGCAGATGGCCTATAGGTTTAATGGTATCGGAGTGAC | |
| | TCAGAACGTACTGTACGAGAACCAGAAGCTCATCGCTAATCAATT | |
| | TAACTCCGCTATCGGAAAAATCCAGGACAGCCTCTCTTCTACAGCT | |
| | AGCGCTCTGGGCAAACTGCAGGATGTCGTTAATCAGAATGCCCAG | |
| | GCCCTGAACACCTTGGTTAAACAACTATCTTCCAACTTCGGGGCCA | |
| | TATCCAGTGTGTTGAATGATATTCTCTCCCGCTTGGATAAGGTGGA | |
| | AGCTGAGGTGCAGATCGATCGCTTGATCACCGGCAGACTGCAGTC | |
| | CCTCCAGACATATGTAACTCAGCAGCTGATTAGAGCCGCCGAGAT | |
| | AAGGGCAAGTGCGAATCTGGCTGCCACCAAGATGAGCGAATGTGT | |
| | ATTGGGCCAGAGCAAACGAGTTGATTTTTGCGGTAAGGGGTATCA | |
| | TTTAATGTCTTTCCCTCAATCCGCACCTCATGGCGTAGTTTTCCTGC | |
| | ATGTGACTTATGTCCCGGCTCAGGAGAAGAATTTTACCACAGCCCC | |
| | CGCGATCTGCCATGACGGAAAGGCCCACTTCCCCCGGGAAGGCGT | |
| | GTTTGTATCCAATGGGACTCACTGGTTTGTCACTCAGCGAAATTTT | |
| | TATGAACCACAGATCATCACCACTGACAACACATTTGTTAGTGGA | |
| | AACTGCGATGTGGTCATCGGCATCGTGAATAACACTGTCTATGATC | |
| | CACTGCAACCTGAACTGGATTCTTTTAAAGAGGAACTCGACAAGT | |
| | ATTTTAAAAACCACACTAGCCCTGACGTGGATCTCGGTGACATTTC | |
| | TGGCATCAACGCTAGCGTAGTGAACATTCAGAAAGAGATAGATAG | |
| | ACTTAATGAGGTGGCCAAGAACCTCAACGAAAGTCTGATCGACCT | |
| | CCAGGAACTGGGGAAATACGAGCAGTACATTAAATGGCCTTGGTA | |
| | CATATGGCTGGGGTTCATTGCTGGGCTGATCGCAATAGTGATGGTG | |
| | ACCATAATGCTCTGTTGCATGACTAGCTGCTGCAGCTGCCTGAAGG | |
| | GCTGCTGTAGTTGTGGGTCATGTTGTAAGTTTGACGAAGATGATAG | |
| | CGAGCCTGTCCTTAAAGGAGTGAAGCTCCACTACACCTAG | |
| Spike CT20 | See Sequence Listing | 80 |
| Optimized | | |
| Spike CT56 | See Sequence Listing | 81 |
| Optimized | | |
| Spike CT83 | See Sequence Listing | 82 |
| Optimized | | |
| Spike CT131 | See Sequence Listing | 83 |
| Optimized | | |
| Spike CT199 | See Sequence Listing | 84 |
| Optimized | | |
| Spike CT1-2C | ATGTTTGTCTTCCTGGTCTTGCTGCCGCTcGTGtctAGCCAGTGCGTG | 85 |
| | AATCTCACCACCCGCACCCAGCTTCCACCTGCCTACACTAACAGCT | |
| | TCACCCGAGGGGTGTATTACCCTGACAAGGTATTCCGGTCCTCCGT | |
| | CCTCCATAGCACGCAGGACCTTTTTCTGCCCTTCTTCTCAAATGTG | |
| | ACATGGTTCCATGCCATTCACGTGAGCGGCACGAATGGAACGAAG | |
| | CGCTTTGATAACCCCGTGCTGCCTTTCAATGACGGCGTCTACTTCG | |
| | CCTCCACTGAAAAGTCAAACATCATCCGGGGCTGGATCTTTGGCAC | |
| | CACTCTTGATTCAAAGACCCAGTCACTGCTGATTGTGAACAATGCT | |
| | ACAAACGTGGTTATCAAaGTcTGcGAGTTTCAGTTCTGTAACGATCC | |
| | ATTTTTGGGAGTGTACTACCACAAGAACAACAAGTCCTGGATGGA | |
| | GTCTGAGTTCAGAGTGTATAGCTCTGCTAACAACTGCACCTTCGAG | |
| | TACGTGTCCCAGCCTTTCCTTATGGACCTGGAAGGCAAACAGGGC | |
| | AATTTCAAAAACCTGAGAGAGTTCGTGTTTAAGAACATTGACGGA | |
| | TACTTCAAAATTTATTCTAAGCACACACCAATTAACTTAGTGCGGG | |
| | ACCTACCCCAAGGCTTTAGCGCCCTAGAGCCCCTGGTTGACCTGCC | |
| | CATTGGGATCAATATAACAAGGTTCCAAACTCTACTGGCTCTGCAT | |
| | AGAAGTTATCTGACCCCAGGAGACAGCTCTAGTGGTTGGACCGCC | |
| | GGCGCAGCAGCCTACTATGTCGGGTACTTACAGCCACGCACGTTCC | |
| | TTCTGAAGTACAATGAGAACGGGACAATCACTGACGCAGTAGACT | |
| | GTGCACTGGACCCGCTAAGCGAGACTAAGTGCACACTTAAATCCT | |
| | TCACGGTGGAGAAAGGCATTTATCAGACCTCTAACTTCAGGGTGC | |
| | AGCCAACAGAAAGCATTGTGCGATTCCCAAATATTACTAATCTTTG | |
| | CCCTTTCGGGGAGGTCTTTAATGCAACTAGATTCGCATCAGTCTAT | |
| | GCGTGGAACCGCAAACGCATTTCCAATTGTGTCGCAGACTACTCA | |
| | GTGCTGTACAACTCTGCCTCTTTCAGTACGTTCAAGTGTTACGGAG | |
| | TGTCACCCACTAAACTGAACGACCTGTGCTTTACAAATGTCTACGC | |
| | TGACTCCTTCGTGATTAGGGGAGACGAGGTGAGACAAATTGCCCC | |
| | CGGACAGACTGGGAAGATTGCCGACTACAATTATAAGCTTCCTGA | |
| | TGATTTCACTGGCTGTGTTATTGCCTGGAATAGTAACAATCTGGAT | |
| | AGCAAGGTGGGAGGCAACTATAACTACTTATATCGACTGTTTAGG | |
| | AAGAGTAATCTGAAACCATTTGAGCGGGATATTTCCACAGAAATT | |
| | TACCAGGCCGGGAGCACACCATGTAATGGGGTGGAGGGATTTAAT | |
| | TGTTACTTCCCACTCCAGAGCTATGGTTTCCAACCCACCAATGGAG | |
| | TGGGTTACCAGCCCTATAGAGTCGTGGTGCTTAGTTTTGAGCTGCT | |
| | TCACGCCCCAGCAACCGTCTGCGGTCCCAAAAAGTCGACCAATCT | |
| | CGTGAAAAACAAATGCGTAAACTTCAACTTTAACGGCTTAACAGG | |
| | AACCGGCGTGCTCACCGAAAGCAACAAGAAATTCCTTCCATTTCA | |
| | GCAATTCGGAAGGGACATCGCCGACACAACAGACGCcGTcAGGGA | |
| | CCCACAGACTCTGGAGATACTGGACATCACTCCTTGTTCGTTTGGG | |
| | GGCGTCTCGGTCATCACACCCGGGACTAATACTAGTAATCAGGTA | |
| | GCAGTTTTATATCAAGGCGTCAACTGTACCGAAGTACCTGTGGCCA | |
| | TACACGCTGATCAGCTAACGCCAACATGGCGAGTCTATTCCACCG | |
| | GCTCTAACGTTTTTCAGACCAGGGCTGGGTGCCTGATAGGGGCAG | |
| | AGCACGTCAATAATTCCTATGAGTGTGATATCCCCATAGGTGCGGG | |
| | GATCTGTGCCAGCTATCAAACCCAAACCAATTCACCAAGGCGAGC | |
| | ACGGTCTGTGGCTTCTCAGAGCATAATTGCATATACAATGTCACTG | |
| | GGCGCTGAGAATAGCGTTGCATACTCTAATAACAGCATAGCCATT | |
| | CCCACGAACTTTACTATCAGTGTGACAACCGAAATATTGCCAGTTT | |
| | CGATGACCAAAACTAGCGTGGATTGCACGATGTACATCTGTGGAG | |
| | ACTCTACCGAATGCAGCAATCTGCTATTACAATATGGCAGCTTCTG | |
| | TACACAGTTAAATCGAGCCTTGACAGGCATCGCAGTGGAACAGGA | |
| | CAAAAATACTCAAGAGGTGTTTGCACAGGTGAAGCAAATCTACAA | |
| | AACGCCCCCCATTAAAGATTTTGGCGGGTTCAATTTTTCACAAATT | |
| | CTCCCCGACCCGTCTAAGCCGAGTAAGCGGTCCTTCATCGAAGATC | |
| | TGCTCTTTAACAAAGTAACCCTCGCCGATGCCGGCTTTATTAAGCA | |
| | GTATGGCGACTGCCTGGGGGATATAGCCGCTCGTGACCTGATTTGC | |
| | GCCCAGAAGTTCAATGGTCTGACCGTGTTGCCTCCTTTATTGACCG | |
| | ATGAAATGATTGCCCAGTACACTAGTGCCCTGCTGGCCGGCACTAT | |
| | CACGTCTGGGTGGACCTTCGGAGCTGGTGCCGCCTTGCAGATACCT | |
| | TTTGCAATGCAGATGGCCTATAGGTTTAATGGTATCGGAGTGACTC | |
| | AGAACGTACTGTACGAGAACCAGAAGCTCATCGCTAATCAATTTA | |
| | ACTCCGCTATCGGAAAAATCCAGGACAGCCTCTCTTCTACAGCTAG | |
| | CGCTCTGGGCAAACTGCAGGATGTCGTTAATCAGAATGCCCAGGC | |
| | CCTGAACACCTTGGTTAAACAACTATCTTCCAACTTCGGGGCCATA | |
| | TCCAGTGTGTTGAATGATATTCTCTCCCGCTTGGATAAGGTGGAAG | |
| | CTGAGGTGCAGATCGATCGCTTGATCACCGGCAGACTGCAGTCCCT | |
| | CCAGACATATGTAACTCAGCAGCTGATTAGAGCCGCCGAGATAAG | |
| | GGCAAGTGCGAATCTGGCTGCCACCAAGATGAGCGAATGTGTATT | |
| | GGGCCAGAGCAAACGAGTTGATTTTTGCGGTAAGGGGTATCATTT | |
| | AATGTCTTTCCCTCAATCCGCACCTCATGGCGTAGTTTTCCTGCATG | |
| | TGACTTATGTCCCGGCTCAGGAGAAGAATTTTACCACAGCCCCCGC | |
| | GATCTGCCATGACGGAAAGGCCCACTTCCCCCGGGAAGGCGTGTT | |
| | TGTATCCAATGGGACTCACTGGTTTGTCACTCAGCGAAATTTTTAT | |
| | GAACCACAGATCATCACCACTGACAACACATTTGTTAGTGGAAAC | |
| | TGCGATGTGGTCATCGGCATCGTGAATAACACTGTCTATGATCCAC | |
| | TGCAACCTGAACTGGATTCTTTTAAAGAGGAACTCGACAAGTATTT | |
| | TAAAAACCACACTAGCCCTGACGTGGATCTCGGTGACATTTCTGGC | |
| | ATCAACGCTAGCGTAGTGAACATTCAGAAAGAGATAGATAGACTT | |
| | AATGAGGTGGCCAAGAACCTCAACGAAAGTCTGATCGACCTCCAG | |
| | GAACTGGGGAAATACGAGCAGTACATTAAATGGCCTTGGTACATA | |
| | TGGCTGGGGTTCATTGCTGGGCTGATCGCAATAGTGATGGTGACCA | |
| | TAATGCTCTGTTGCATGACTAGCTGCTGCAGCTGCCTGAAGGGCTG | |
| | CTGTAGTTGTGGGTCATGTTGTAAGTTTGACGAAGATGATAGCGAG | |
| | CCTGTCCTTAAAGGAGTGAAGCTCCACTACACCTAG | |
| Spike IDT-4C | See Sequence Listing | 86 |
| Spike-SGI | See Sequence Listing | 87 |

### Cloning of Sequence-Optimized Spike Sequences

[0564] Each sequence-optimized Spike sequence was ordered as a set of 3 gBlocks from IDT with each gblock between 1300-1500 bp and overlapping with each other by approximately 100 nucleotides. The gBlocks comprising the 5′ and 3′ ends of the Spike sequence overlapped with the plasmid backbone by 100 nucleotides. The gblocks were assembled by a combination of PCR and Gibson assembly into a linearized pA68-E4d AsisI/PmeI backbone to generate pA68-E4-sequence-optimized Spike clones. Clones were screened by PCR and clones of the correct size were then grown for plasmid production and sequencing by either NGS or Sanger sequencing. Once a correct clone was sequence confirmed, large scale plasmid production and purification was performed for transfection.

### Vector Production

[0565] pA68-E4-Spike plasmid DNA was digested with PacI and 2 μg DNA was transfected into 293F cells using TransIt Lenti transfection reagent. Five days post transfection, cells and media were harvested and a lysate generated by freeze-thawing at ˜80C and at 37 C. A fraction of the lysate was used to re-infect 30 mL of 293F cells and incubated for 48-72h before harvesting. Lysate was generated by freeze-thawing at ˜80C and at 37 C and a fraction of the lysate was used to infect 400 mL of 293F cells seeded at 1e6 cells/mL. Next, 48-72h later cells were harvested, lysed in 10 mM tris pH 8.0/0.1% Triton X-100 and freeze thawed 1× at 37 and ˜80C. The lysate was then clarified by centrifugation at 4300×g for 10 min prior to loading on a 1.2/1.4 CsCl gradient. The gradient was run for a minimum of 2h before the bands were harvested diluted 2-4× in Tris and then rerun on a 1.35 CsCl gradient for at least 2 h. The viral bands were harvested and then dialyzed 3× in 1× ARM buffer. The virus infectious titer was determined by an immunostaining titer assay and the viral particle measured by Absorbance at A260 nm.

### Western Analysis

[0566] Samples for Spike expression analysis were either harvested at designated times post transfection or in the case of purified virus by setting up a controlled infection experiment with a known virus MOI and harvested at a specific time post infection, typically 24 to 48h. 1e6 cells were typically harvested in 0.5 mL of SDS-PAGE loading buffer with 10% Beta-mercaptoethanol. Samples were boiled and run on 4-20% polyacrylamide gels under denaturing and reducing conditions. The gels were then blotted onto a PVDF membrane using a BioRad Rapid transfer device. The membrane was blocked for 2 h at room temperature in 5% Skim milk in TBST. The membrane was then probed with an anti-Spike SI polyclonal (Sino Biologicals) or anti-Spike monoclonal antibody 1A9 (GeneTex; Cat. No. GTX632604) and incubated for 2 h. The membrane was then washed in PBST (5×) and the probed with a HRP-linked anti-mouse antibody (Bethyl labs) for 1 h. The membrane was washed as described above and then incubated with a chemiluminescent substrate ECL plus (ThermoFisher). The image was then captured using a Chemidoc (BioRad device).

### Results

[0567] Expression of Spike S2 protein was assessed during viral production in 293F cells with various Spike-encoding vectors. As shown in FIG. 8A, using vectors encoding IDT sequence-optimized Spike cassettes, Spike S2 protein was detected by Western blot using an anti-Spike S2 antibody (GeneTex) when expressed in a SAM vector (FIG. 8A, last lane) but not when expressed in a ChAdV68 vector (“CMV-Spike (IDT)”; SEQ ID NO:69) at two different MOIs and timepoints (FIG. 8A, lanes 1 and 7). Two clones engineered to express Spike variant D614G (“CMV-Spike (IDT)-D614G” SEQ ID NO:70) also did not express detectable levels of Spike protein by Western using the S2 antibody (FIG. 8A, lanes 2 and 3). Clones engineered to co-express the SARS-COV-2 Membrane protein together with Spike (“CMV-Spike (IDT)-D614G-Mem” SEQ ID NO:66) or including a R682V mutations to disrupt the Furin cleavage site did not rescue the expression phenotype (FIG. 8A, lanes 4 and 5). In contrast, as shown in FIG. 8B, Spike SI protein was detected for all IDT constructs, albeit at low levels, with the exception of the Furin R682V mutation in which no Spike SI protein was detected.

[0568] To deconvolute if the expressions issues with the IDT sequence-optimized clones were specific to the SI or S2 domains, vectors expressing only the SI or S2 domains were also evaluated. As shown in FIG. 8C, a ChAdV68 vector encoding the IDT sequence-optimized Spike S1 protein alone demonstrated strong protein expression, in contrast to the lower expression observed with the full-length Spike vector (FIG. 8C, lanes 1 vs 2). As expected, no signal was observed for SI with the vector encoding the S2 domain alone. In contrast, as shown in FIG. 8D, a ChAdV68 vector encoding the IDT sequence-optimized Spike S2 protein alone did not demonstrate observable protein expression, comparable to the absence of signal observed with the full-length Spike vector (FIG. 8D, lanes 1 and 3). Thus, the data indicate the IDT sequence-optimized Spike S2 exhibited poor expression, including impacting expression of the full-length Spike sequence.

[0569] To address protein expression, the SARS-COV-2 Spike-encoding nucleotide sequence was sequence-optimized using additional sequence-optimization algorithms; (1) a single sequence (SEQ ID NO:87) generated using SGI DNA (La Jolla, CA); (2) 6 sequences designated CT1, CT20, CT56, CT83, CT131, and CT 199 (SEQ ID NOs:79-84) generated using COOL (COOL algorithm generates multiple sequences and 6 were selected). As shown in FIG. 8A and FIG. 8B, sequence—optimization with the COOL algorithm generated a sequence—CT1 (SEQ ID NO:79)—that demonstrated detectable expression using a ChAdV68 vector as assessed by Western using both an anti-S2 and anti-S1 antibody (FIG. 8A and FIG. 8B, each respective lane 6 “ChAd-Spike CT1-D614G”). The additional sequences generated using the COOL algorithm and the SGI algorithm were also assessed by Western. As shown in FIG. 9, the SGI clone and COOL sequence CT131 also demonstrated detectable levels of Spike protein by Western using an anti-S2 antibody (FIG. 9, lanes 3 and 6), while other COOL generated sequences did not generate detectable signals other than the control CT1 derived sequence (lane 2). Thus, the data indicate that specific sequence-optimizations improved expression of full-length SARS-COV-2 Spike protein in ChAdV68 vectors.

[0570] SARS-COV-2 is a cytoplasm-replicating positive-sense RNA virus encoding its own replication machinery, and as such SARS-COV-2 mRNA are not naturally processed by splicing and nuclear-export machineries. As illustrated in FIG. 10A, to assess the role of splicing in SARS-COV-2 Spike-encoding mRNA expressed from a ChAdV68 vector, primers were designed to amplify the Spike coding region. In the presence of mRNA splicing, amplicon sizes would be smaller than the expected full-length coding region. As shown in FIG. 10B, while PCR of the plasmid encoding the SARS-COV-2 Spike cassette demonstrated the expected amplicon size (“Spike Plasmid” left panel, right column), PCR amplification of cDNA from infected 293 cells demonstrated two smaller amplicons indicating splicing of the mRNA transcript (“ChAd-Spike (IDT) cDNA” left panel, left column). In addition, the Spike coding sequence was split into SI and S2 encoding sequences. As also shown in FIG. 10B, PCR amplification of SI cDNA from infected 293 cells demonstrated the expected amplicon size (“SpikeS1” right panel, left column) indicating SI was likely not undergoing undesired splicing while sequences in the S2 region may be influencing splicing.

[0571] The smaller amplicon sequences were analyzed and two splice donor sites were identified by Sanger sequencing. Three additional potential donor sites were predicted by further sequence analysis. The position and identity of the splice motif sequences are presented below (the nt triplets correspond to codons, numbering starts with reference to Spike ATG):

NT 385-:
AAG GTG TGT → AAa GTc TGc (identified by sequencing)
NT 539-:
AA GGT AAG C → Ag GGc AAa C (identified by sequencing)
NT 2003-:
CA GGT ATC T → Ct GGa ATC T (predicted)
NT 2473-:
AAG GTG ACC → AAa GTc ACC (predicted)
NT 3417-:
C CCC CTT CAG CCT GAA CTT GAT TCC (SEQ ID NO: 123) → T CCa CTg
CAa CCT GAA CTT GAT agt (SEQ ID NO: 124)

[0572] Selected splice donor sites were removed by site-directed mutagenesis disrupting the nucleotide sequence motif while not disturbing the amino acid sequence. COOL sequence-optimized clone CT1 was used as the reference sequence for clone CT1-2C (SEQ ID NO:85) having the sequence-identified splice donor motifs at NT385 and NT539 mutated. IDT sequence-optimized clone was used as the reference sequence for clone IDT-4C (SEQ ID NO:86) and had both sequence-identified and predicted splice donor motifs at NT385, NT539, NT2003, and NT2473 mutated, as well as a possible polyadenylation site AATAAA at NT445 mutated to AAcAAA. As shown in FIG. 9, Spike protein expression was detected by Western in the clone including the sequence-identified splice donor motifs (“CT1-2C” lane 2). Splicing was further assessed in the constructs by PCR analysis. As shown in FIG. 11, mutating the splice donor motifs and/or a potential polyA site alone did not prevent splicing indicating splicing potentially occurred from sub-dominant splice sites.

[0573] Given the identification of splicing events in the full-length Spike mRNA expressed from ChAdV68 vectors, additional constructs are generated and assessed for improved protein expression. Additional optimizations include constructs featuring exogenous nuclear export signals (e.g., Constitutive Transport Element (CTE), RNA Transport Element (RTE), or Woodchuck Posttranscriptional Regulatory Element (WPRE)) or the addition of an artificial intron through introduction of exogenous splice donor/branch/acceptor motif sequences to bias splicing, such as introducing a SV40 mini-intron (SEQ ID NO:88) between the CMV promoter and the Kozak sequence immediately upstream of the Spike gene. The identified and predicted splice donor motifs are also further evaluated in combination with additional sequence optimizations.

### XIV.D. SARS-COV-2 Vaccine Efficacy Evaluation

[0574] Various SARS-COV-2 vaccine designs, constructs, and dosing regimens were evaluated. The vaccines encoded various optimized versions of the Spike protein, selected predicted T cell epitopes (TCE), or a combination of Spike and TCE cassettes.

### Mouse Immunizations

[0575] All mouse studies were conducted at Murigenics under IACUC approved protocols. Balb/c mice (Envigo), 6-8 weeks old were used for all studies. Vaccines were stored at −80° C., thawed at room temperature on the day of immunization, and then diluted to 0.1 μg/mL with PBS and filtered through a 0.2 micron filter. Filtered formulations were stored at 4° C. and injected within 4 hours of preparation. All immunizations were bilateral intramuscular to the tibialis anterior, 2 injections of 50 μL each, 100 μL total.

### Non-Human Primate Immunizations

[0576] For SAM vaccines in Mamu-A*01 Indian rhesus macaques, SAM was administered as bilateral intramuscular injections into the quadriceps muscle at the indicated doses.

[0577] For ChAdV68 vaccines in Mamu-A*01 Indian rhesus macaques, ChAdV68 was administered bilaterally at the indicated doses (5×10¹¹ viral particles per injection).

### Immune Monitoring in Rhesus

[0578] For immune monitoring, 10-20 mL of blood was collected into vacutainer tubes containing heparin and maintained at room temperature until isolation. PBMCs were isolated by density gradient centrifugation using lymphocyte separation medium (LSM) and Leucosep separator tubes. PBMCs were stained with propidium iodide and viable cells counted using the Cytoflex LX (Beckman Coulter). Samples were then resuspended at 4×10⁶ cells/mL in RPMI complete (10% FBS).

### Splenocyte Isolation

[0579] For the evaluation of T-cell response, mouse spleens were extracted at various timepoints following immunization. Note that in some studies immunizations were staggered to enable spleens to be collected at the same time and compared. Spleens were collected and analyzed by IFNγ ELISpot and ICS. Spleens were suspended in RPMI complete (RPMI+10% FBS) and dissociated using the gentleMACS Dissociator (Miltenyi Biotec). Dissociated cells were filtered using a 40 μm strainer and red blood cells were lysed with ACK lysing buffer (150 mM NH₄Cl, 10 mM KHCO₃, 0.1 mM EDTA). Following lysis, cells were filtered with a 30 μm strainer and resuspended in RPMI complete.

### Serum Collection in Mice

[0580] At various timepoints post immunization 200 μL of blood was drawn. Blood was centrifuged at 1000 g for 10 minutes at room temperature. Serum was collected and frozen at -80° C.

### S1 IgG MSD/ELISA

[0581] 96-well QuickPlex plates (Meso Scale Discovery, Rockville, MD) were coated with 50 μL of 1 μg/mL SARS-COV-2 SI (ACROBiosystems, Newark, DE), diluted in DPBS (Corning, Corning, NY), and incubated at 4° C. overnight. Wells were washed three times with agitation using 250 μL of PBS+0.05% Tween-20 (Teknova, Hollister, CA) and plates blocked with 150 μL Superblock PBS (Thermo Fisher Scientific, Waltham, MA) for 1 hour at room temperature on an orbital shaker. Test sera was diluted at appropriate series in 10% species-matched serum (Innovative Research, Novi, MI) and tested in single wells on each plate. Starting dilution 1:100, 3-fold dilutions, 11 dilutions per sample. Wells were washed and 50 μL of the diluted samples were added to wells and incubated for 1 hour at room temperature on an orbital shaker. Wells were washed and incubated with 25 μL of 1 μg/mL SULFO-TAG labeled anti-mouse antibody (MSD), diluted in DPBS+1% BSA (Sigma-Aldrich, St. Louis, MO), for 1 hour at room temperature on an orbital shaker. Wells were washed and 150 μL tripropylamine containing read buffer (MSD) added. Plates were run immediately using the QPlex SQ 120 (MSD) ECL plate reader. Endpoint titer is defined as the reciprocal dilution for each sample at which the signal is twice the background value, and is interpolated by fitting a line between the final two values that are greater than twice the background value. The background values is the average value (calculated for each plate) of the control wells containing 10% species-matched scrum only.

### Antibody Titers

[0582] For antibody response monitoring, antibody titers, including neutralizing antibody titers, in the sera were determined as described in J. Yu et al. (Science 10.1126/science. Abc6284, 2020), herein incorporated by reference for all purposes.

### IFNγ ELISpot Analysis

[0583] IFNγ ELISpot assays were performed using pre-coated 96-well plates (MAbtech, Mouse IFNγ ELISpot PLUS, ALP) following manufacturer's protocol. Samples were stimulated overnight with various overlapping peptide pools (15 amino acids in length, 11 amino acid overlap), at a final concentration of 1 μg/mL per peptide. For Spike—eight different overlapping peptide pools spanning the SARS-COV-2 Spike antigen (Genscript, 36-40 peptides per pool). Splenocytes were plated in duplicate at 1×10⁵ cells per well for each Spike pool, and 2.5×10⁴ cells per well (mixed with 7.5×10+naïve cells) for Spike pools 2, 4, and 7. To measure response to the TCE cassette—one pool spanning Nucleocapsid protein (JPT, NCap-1, 102 peptides), one spanning Membrane protein (JPT, VME-1, 53 peptides), and one spanning the Orf3a regions encoded in the cassette (Genscript, 38 peptides). For TCE peptide pools, splenocytes were plated in duplicate at 2×10⁵ cells per well for each pool. Sequences for peptide pools are presented in Table D (SEQ ID NOS. 27180-27495), Table E (SEQ ID NOS. 27496-27603), and Table F (SEQ ID NOS. 27604-27939). A DMSO only control was plated for each sample and cell number. Following overnight incubation at 37° C., plates were washed with PBS and incubated with anti-monkey IFNγ mAb biotin (MAbtech) for two hours, followed by an additional wash and incubation with Streptavidin-ALP (MAbtech) for one hour. After final wash, plates were incubated for ten minutes with BCIP/NBT (MAbtech) to develop the immunospots. Spots were imaged and enumerated using an AID reader (Autoimmun Diagnostika). For data processing and analysis, samples with replicate well variability (Variability=Variance/(median+1)) greater than 10 and median greater than 10 were excluded. Spot values were adjusted based on the well saturation according to the formula:

[0584] AdjustedSpots=RawSpots+2*(RawSpots*Saturation/(100−Saturation)

[0585] Each sample was background corrected by subtracting the average value of the negative control peptide wells. Data is presented as spot forming colonies (SFC) per 1×10⁶ splenocytes. Wells with well saturation values greater than 35% were labeled as “too numerous to count” (TNTC) and excluded. For samples and peptides that were TNTC, the value measured with 2.5×10⁴ cells/well was used.

### Vaccine Constructs

[0586] The various sequences evaluated are as follows:
[0587] “IDTSpike_{g}”: SARS-COV-2 Spike protein encoded by IDT optimized sequence (see SEQ ID NO:69) and including a D614G mutation with reference to SEQ ID NO:59 (see corresponding nucleotide mutation in SEQ ID NO:70); also referred to as “Spike V1”
[0588] “CTSpike_{g}”: SARS-COV-2 Spike protein encoded by Cool Tool optimized sequence version 1 (SEQ ID NO:79) including a D614G mutation with reference to SEQ ID NO:59 (see corresponding nucleotide mutation in SEQ ID NO:70); also referred to as “Spike V2.” In versions referred to as “CTSpike_{D}” D614 is not altered.
[0589] “CTSpikeF2P_{g}”: SARS-COV-2 Spike protein encoded by Cool Tool optimized sequence version 1 (SEQ ID NO:79) including a R682V to disrupt the Furin cleavage site (682-685 RRAR [SEQ ID NO: 125] to GSAS [SEQ ID NO: 126]); and K986P and V987P to interfere with the secondary structure of Spike with reference to the reference Spike protein (SEQ ID NO:59). The nucleotide sequence is shown in SEQ ID NO:89 and protein sequence shown in SEQ ID NO:90
[0590] “TCE5”: Selected CD8+epitopes predicted by the EDGE platform to be presented on MHC molecules for SARS-COV-2 proteins other than Spike. The 15 selected epitopes are presented along with their order in the cassette in Table 7. The nucleotide sequence is shown in SEQ ID NO:91 and protein sequence shown in SEQ ID NO:92. FIG. 12 shows the estimated protection across the four indicated populations for TCE5. All populations are estimated to have coverage above 95% up to at least the threshold of 7 epitopes (last column).
[0591] The SAM vector SAM-SGP1-TCE5-SGP2-CTSpikeGF2P is shown in SEQ ID NO:93
[0592] The ChAd vector ChAd-CMV-CTSpikeGF2P-CMV-TCE5 (EPE) is shown in SEQ ID NO:114
[0593] Additional vectors and Spike variants were designed for evaluation as shown in SEQ ID NOs: 109-113

TABLE 6
Encoded Spike Variants

CTSpikeF2Pg nucleotide (SEQ ID NO: 89); Bold Italic Furin Mutation 682-685 RRAR (SEQ ID
NO: 125) to GSAS (SEQ ID NO: 126), Bold Lower Case K986P and V987P
ATGTTTGTCTTCCTGGTCTTGCTGCCGCTGGTGAGCAGCCAGTGCGTGAATCTCACCACCCGCACCC
AGCTTCCACCTGCCTACACTAACAGCTTCACCCGAGGGGTGTATTACCCTGACAAGGTATTCCGGTC
CTCCGTCCTCCATAGCACGCAGGACCTTTTTCTGCCCTTCTTCTCAAATGTGACATGGTTCCATGCCA
TTCACGTGAGCGGCACGAATGGAACGAAGCGCTTTGATAACCCCGTGCTGCCTTTCAATGACGGCG
TCTACTTCGCCTCCACTGAAAAGTCAAACATCATCCGGGGCTGGATCTTTGGCACCACTCTTGATTC
AAAGACCCAGTCACTGCTGATTGTGAACAATGCTACAAACGTGGTTATCAAGGTGTGTGAGTTTCA
GTTCTGTAACGATCCATTTTTGGGAGTGTACTACCACAAGAACAACAAGTCCTGGATGGAGTCTGA
GTTCAGAGTGTATAGCTCTGCTAACAACTGCACCTTCGAGTACGTGTCCCAGCCTTTCCTTATGGAC
CTGGAAGGCAAACAGGGCAATTTCAAAAACCTGAGAGAGTTCGTGTTTAAGAACATTGACGGATA
CTTCAAAATTTATTCTAAGCACACACCAATTAACTTAGTGCGGGACCTACCCCAAGGCTTTAGCGCC
CTAGAGCCCCTGGTTGACCTGCCCATTGGGATCAATATAACAAGGTTCCAAACTCTACTGGCTCTGC
ATAGAAGTTATCTGACCCCAGGAGACAGCTCTAGTGGTTGGACCGCCGGCGCAGCAGCCTACTATG
TCGGGTACTTACAGCCACGCACGTTCCTTCTGAAGTACAATGAGAACGGGACAATCACTGACGCAG
TAGACTGTGCACTGGACCCGCTAAGCGAGACTAAGTGCACACTTAAATCCTTCACGGTGGAGAAAG
GCATTTATCAGACCTCTAACTTCAGGGTGCAGCCAACAGAAAGCATTGTGCGATTCCCAAATATTA
CTAATCTTTGCCCTTTCGGGGAGGTCTTTAATGCAACTAGATTCGCATCAGTCTATGCGTGGAACCG
CAAACGCATTTCCAATTGTGTCGCAGACTACTCAGTGCTGTACAACTCTGCCTCTTTCAGTACGTTC
AAGTGTTACGGAGTGTCACCCACTAAACTGAACGACCTGTGCTTTACAAATGTCTACGCTGACTCCT
TCGTGATTAGGGGAGACGAGGTGAGACAAATTGCCCCCGGACAGACTGGGAAGATTGCCGACTAC
AATTATAAGCTTCCTGATGATTTCACTGGCTGTGTTATTGCCTGGAATAGTAACAATCTGGATAGCA
AGGTGGGAGGCAACTATAACTACTTATATCGACTGTTTAGGAAGAGTAATCTGAAACCATTTGAGC
GGGATATTTCCACAGAAATTTACCAGGCCGGGAGCACACCATGTAATGGGGTGGAGGGATTTAATT
GTTACTTCCCACTCCAGAGCTATGGTTTCCAACCCACCAATGGAGTGGGTTACCAGCCCTATAGAGT
CGTGGTGCTTAGTTTTGAGCTGCTTCACGCCCCAGCAACCGTCTGCGGTCCCAAAAAGTCGACCAAT
CTCGTGAAAAACAAATGCGTAAACTTCAACTTTAACGGCTTAACAGGAACCGGCGTGCTCACCGAA
AGCAACAAGAAATTCCTTCCATTTCAGCAATTCGGAAGGGACATCGCCGACACAACAGACGCGGTG
AGGGACCCACAGACTCTGGAGATACTGGACATCACTCCTTGTTCGTTTGGGGGCGTCTCGGTCATC
ACACCCGGGACTAATACTAGTAATCAGGTAGCAGTTTTATATCAAGGCGTCAACTGTACCGAAGTA
CCTGTGGCCATACACGCTGATCAGCTAACGCCAACATGGCGAGTCTATTCCACCGGCTCTAACGTTT
TTCAGACCAGGGCTGGGTGCCTGATAGGGGCAGAGCACGTCAATAATTCCTATGAGTGTGATATCC
CCATAGGTGCGGGGATCTGTGCCAGCTATCAAACCCAAACCAATTCACCAgGGaGcGCAaGcTCTGT
GGCTTCTCAGAGCATAATTGCATATACAATGTCACTGGGCGCTGAGAATAGCGTTGCATACTCTAA
TAACAGCATAGCCATTCCCACGAACTTTACTATCAGTGTGACAACCGAAATATTGCCAGTTTCGATG
ACCAAAACTAGCGTGGATTGCACGATGTACATCTGTGGAGACTCTACCGAATGCAGCAATCTGCTA
TTACAATATGGCAGCTTCTGTACACAGTTAAATCGAGCCTTGACAGGCATCGCAGTGGAACAGGAC
AAAAATACTCAAGAGGTGTTTGCACAGGTGAAGCAAATCTACAAAACGCCCCCCATTAAAGATTTT
GGCGGGTTCAATTTTTCACAAATTCTCCCCGACCCGTCTAAGCCGAGTAAGCGGTCCTTCATCGAAG
ATCTGCTCTTTAACAAAGTAACCCTCGCCGATGCCGGCTTTATTAAGCAGTATGGCGACTGCCTGGG
GGATATAGCCGCTCGTGACCTGATTTGCGCCCAGAAGTTCAATGGTCTGACCGTGTTGCCTCCTTTA
TTGACCGATGAAATGATTGCCCAGTACACTAGTGCCCTGCTGGCCGGCACTATCACGTCTGGGTGG
ACCTTCGGAGCTGGTGCCGCCTTGCAGATACCTTTTGCAATGCAGATGGCCTATAGGTTTAATGGTA
TCGGAGTGACTCAGAACGTACTGTACGAGAACCAGAAGCTCATCGCTAATCAATTTAACTCCGCTA
TCGGAAAAATCCAGGACAGCCTCTCTTCTACAGCTAGCGCTCTGGGCAAACTGCAGGATGTCGTTA
ATCAGAATGCCCAGGCCCTGAACACCTTGGTTAAACAACTATCTTCCAACTTCGGGGCCATATCCA
GTGTGTTGAATGATATTCTCTCCCGCTTGGATccacctGAAGCTGAGGTGCAGATCGATCGCTTGATCA
CCGGCAGACTGCAGTCCCTCCAGACATATGTAACTCAGCAGCTGATTAGAGCCGCCGAGATAAGGG
CAAGTGCGAATCTGGCTGCCACCAAGATGAGCGAATGTGTATTGGGCCAGAGCAAACGAGTTGATT
TTTGCGGTAAGGGGTATCATTTAATGTCTTTCCCTCAATCCGCACCTCATGGCGTAGTTTTCCTGCAT
GTGACTTATGTCCCGGCTCAGGAGAAGAATTTTACCACAGCCCCCGCGATCTGCCATGACGGAAAG
GCCCACTTCCCCCGGGAAGGCGTGTTTGTATCCAATGGGACTCACTGGTTTGTCACTCAGCGAAATT
TTTATGAACCACAGATCATCACCACTGACAACACATTTGTTAGTGGAAACTGCGATGTGGTCATCG
GCATCGTGAATAACACTGTCTATGATCCACTGCAACCTGAACTGGATTCTTTTAAAGAGGAACTCG
ACAAGTATTTTAAAAACCACACTAGCCCTGACGTGGATCTCGGTGACATTTCTGGCATCAACGCTA
GCGTAGTGAACATTCAGAAAGAGATAGATAGACTTAATGAGGTGGCCAAGAACCTCAACGAAAGT
CTGATCGACCTCCAGGAACTGGGGAAATACGAGCAGTACATTAAATGGCCTTGGTACATATGGCTG
GGGTTCATTGCTGGGCTGATCGCAATAGTGATGGTGACCATAATGCTCTGTTGCATGACTAGCTGCT
GCAGCTGCCTGAAGGGCTGCTGTAGTTGTGGGTCATGTTGTAAGTTTGACGAAGATGATAGCGAGC
CTGTCCTTAAAGGAGTGAAGCTCCACTACACCTAG
CTSpikeF2Pg amino acid (SEQ ID NO: 90); Bold Italic Furin Mutation 682-685 RRAR (SEQ ID
NO: 125) to GSAS (SEQ ID NO: 126), Bold Lower Case K986P and V987P
MFVFLVLLPLVSSQCVNLTTRTQLPPAYTNSFTRGVYYPDKVFRSSVLHSTQDLFLPFFSNVTWFHAIHV
SGTNGTKRFDNPVLPFNDGVYFASTEKSNIIRGWIFGTTLDSKTQSLLIVNNATNVVIKVCEFQFCNDPFL
GVYYHKNNKSWMESEFRVYSSANNCTFEYVSQPFLMDLEGKQGNFKNLREFVFKNIDGYFKIYSKHTPI
NLVRDLPQGFSALEPLVDLPIGINITRFQTLLALHRSYLTPGDSSSGWTAGAAAYYVGYLQPRTFLLKYN
ENGTITDAVDCALDPLSETKCTLKSFTVEKGIYQTSNFRVQPTESIVRFPNITNLCPFGEVENATRFASVY
AWNRKRISNCVADYSVLYNSASFSTFKCYGVSPTKLNDLCFTNVYADSFVIRGDEVRQIAPGQTGKIAD
YNYKLPDDFTGCVIAWNSNNLDSKVGGNYNYLYRLFRKSNLKPFERDISTEIYQAGSTPCNGVEGENCY
FPLQSYGFQPTNGVGYQPYRVVVLSFELLHAPATVCGPKKSTNLVKNKCVNFNFNGLTGTGVLTESNK
KFLPFQQFGRDIADTTDAVRDPQTLEILDITPCSFGGVSVITPGTNTSNQVAVLYQGVNCTEVPVAIHAD
QLTPTWRVYSTGSNVFQTRAGCLIGAEHVNNSYECDIPIGAGICASYQTQTNSPGSASSVASQSIIAYTMS
LGAENSVAYSNNSIAIPTNFTISVTTEILPVSMTKTSVDCTMYICGDSTECSNLLLQYGSFCTQLNRALTGI
AVEQDKNTQEVFAQVKQIYKTPPIKDFGGFNFSQILPDPSKPSKRSFIEDLLFNKVTLADAGFIKQYGDCL
GDIAARDLICAQKFNGLTVLPPLLTDEMIAQYTSALLAGTITSGWTFGAGAALQIPFAMQMAYRENGIG
VTQNVLYENQKLIANQFNSAIGKIQDSLSSTASALGKLQDVVNQNAQALNTLVKQLSSNFGAISSVLNDI
LSRLDppEAEVQIDRLITGRLQSLQTYVTQQLIRAAEIRASANLAATKMSECVLGQSKRVDFCGKGYHL
MSFPQSAPHGVVFLHVTYVPAQEKNFTTAPAICHDGKAHFPREGVFVSNGTHWFVTQRNFYEPQIITTD
NTFVSGNCDVVIGIVNNTVYDPLQPELDSFKEELDKYFKNHTSPDVDLGDISGINASVVNIQKEIDRLNE
VAKNLNESLIDLQELGKYEQYIKWPWYIWLGFIAGLIAIVMVTIMLCCMTSCCSCLKGCCSCGSCCKED
EDDSEPVLKGVKLHYT*

TABLE 7
TCE5 Cassette (Order of Frames as Shown)

| | | Start | End | SEQ | |
|---|---|---|---|---|---|
| Frame | Gene | aa | aa | ID NO | Amino Acid Sequence |
| 1 | ORF3a | 102 | 152 | 94 | EAPFLYLYALVYFLQSINFVRIIMRLWLCWKCRSKNPLL |
| | | | | | YDANYFLCWHTN |
| 2 | ORF3a | 53 | 85 | 95 | LAVFQSASKIITLKKRWQLALSKGVHFVCNLLL |
| 3 | ORF3a | 13 | 55 | 96 | VTLKQGEIKDATPSDFVRATATIPIQASLPFGWLIVGVAL |
| | | | | | LAV |
| 4 | N | 40 | 94 | 97 | RRPQGLPNNTASWFTALTQHGKEDLKFPRGQGVPINTN |
| | | | | | SSPDDQIGYYRRATRRI |
| 5 | M | 84 | 102 | 98 | MACLVGLMWLSYFIASFRL |
| 6 | N | 369 | 408 | 99 | KKDKKKKADETQALPQRQKKQQTVTLLPAADLDDESK |
| | | | | | QLQ |
| 7 | N | 284 | 338 | 100 | GNFGDQELIRQGTDYKHWPQIAQFAPSASAFFGMSRIG |
| | | | | | MEVTPSGTWLTYTGAIK |
| 8 | ORF3a | 169 | 198 | 101 | ITSGDGTTSPISEHDYQIGGYTEKWESGVK |
| 9 | N | 233 | 282 | 102 | KMSGKGQQQQGQTVTKKSAAEASKKPRQKRTATKAY |
| | | | | | NVTQAFGRRGPEQT |
| 10 | M | 56 | 75 | 103 | LLWPVTLACFVLAAVYRINW |
| 11 | N | 346 | 375 | 104 | FKDQVILLNKHIDAYKTFPPTEPKKDKKKK |
| 12 | N | 205 | 239 | 105 | TSPARMAGNGGDAALALLLLDRLNQLESKMSGKGQ |
| 13 | N | 100 | 118 | 106 | KMKDLSPRWYFYYLGTGPE |
| 14 | ORF3a | 199 | 254 | 107 | DCVVLHSYFTSDYYQLYSTQLSTDTGVEHVTFFIYNKIV |
| | | | | | DEPEEHVQIHTIDGSSG |
| 15 | N | 129 | 174 | 108 | GIIWVATEGALNTPKDHIGTRNPANNAAIVLQLPQGTTL |
| | | | | | PKGFYAE |

TCE5 Nucleotide Sequence (SEQ ID NO: 91):
ATGGCTGGCGAGGCCCCCTTCCTTTACCTGTACGCCCTTGTGTATTTCCTGCAGAGCATCAAT
TTTGTGAGAATCATCATGAGGCTGTGGCTTTGCTGGAAATGTAGGAGCAAGAACCCCCTGTT
GTATGACGCCAACTACTTTCTGTGTTGGCACACCAATCTCGCCGTGTTCCAGAGTGCCTCTA
AGATCATTACACTGAAAAAGCGGTGGCAGCTTGCACTTTCTAAGGGAGTGCATTTCGTTTGC
AACCTGCTCCTGGTGACACTCAAGCAGGGGGAAATCAAAGACGCCACCCCTAGCGACTTCG
TTAGAGCCACTGCCACAATCCCAATCCAGGCTTCCCTGCCTTTCGGCTGGCTTATCGTGGGT
GTGGCACTGTTGGCTGTGCGGAGACCACAGGGACTGCCTAATAATACAGCTAGCTGGTTTAC
CGCTCTGACACAGCATGGCAAAGAAGACCTCAAGTTCCCTCGCGGTCAGGGGGTGCCTATT
AACACTAATAGCTCTCCAGACGACCAAATTGGGTATTACAGGCGCGCCACAAGACGGATCA
TGGCCTGCTTAGTGGGGCTGATGTGGCTATCCTATTTTATTGCTAGCTTTCGCCTGAAGAAG
GACAAGAAGAAGAAAGCTGATGAGACCCAGGCACTGCCCCAGCGCCAAAAGAAGCAGCAG
ACAGTCACACTGCTCCCTGCTGCAGACCTGGATGACTTCAGCAAGCAGCTGCAGGGGAACT
TTGGCGACCAGGAGCTGATTAGACAGGGGACTGACTATAAGCATTGGCCTCAGATTGCTCA
GTTCGCCCCAAGTGCATCCGCCTTCTTCGGGATGTCACGAATAGGAATGGAAGTGACCCCTT
CTGGGACATGGTTGACATACACCGGAGCAATCAAGATTACCTCCGGGGACGGTACCACGTC
TCCTATTAGCGAACACGATTATCAGATAGGGGGATATACTGAGAAGTGGGAGTCCGGCGTC
AAAAAGATGAGTGGGAAAGGCCAGCAGCAACAAGGCCAAACAGTTACTAAAAAGTCTGCC
GCAGAAGCTAGTAAAAAGCCTCGCCAGAAGCGGACAGCCACCAAAGCTTACAATGTGACTC
AGGCCTTCGGCCGCCGGGGGCCTGAACAGACCCTCTTGTGGCCCGTTACCCTCGCATGTTTC
GTGCTTGCAGCTGTGTACAGGATCAATTGGTTTAAGGATCAGGTTATCCTGTTGAACAAACA
TATAGATGCCTATAAGACATTCCCACCCACCGAGCCAAAGAAAGATAAGAAAAAGAAAACT
AGTCCTGCAAGGATGGCCGGCAATGGAGGAGACGCAGCCTTAGCCCTGCTCTTACTCGACA
GGCTGAACCAACTTGAGTCTAAAATGAGCGGTAAAGGGCAGAAGATGAAGGATCTGTCCCC
AAGGTGGTATTTCTACTATCTGGGCACCGGCCCTGAGGATTGTGTCGTCCTCCACTCATACTT
CACTAGCGATTATTACCAGCTGTATAGTACACAATTATCTACCGACACAGGCGTCGAGCACG
TGACCTTCTTTATATACAATAAGATCGTGGATGAACCAGAGGAGCATGTGCAGATCCACACT
ATTGATGGCTCTAGCGGGGGCATCATCTGGGTGGCAACAGAAGGAGCCCTCAACACCCCAA
AGGACCATATCGGCACCAGGAATCCAGCCAACAATGCCGCCATTGTTCTGCAGCTCCCTCAG
GGCACTACTCTCCCTAAAGGCTTCTATGCTGAGGGACCCGGACCAGGCGCCAAATTTGTTGC
TGCTTGGACACTGAAAGCTGCTGCTGGGCCCGGACCAGGCCAGTACATCAAGGCCAACTCT
AAGTTTATCGGCATCACCGAATTGGGACCTGGACCCGGCTAG
TCE5 Amino Acid Sequence (SEQ ID NO: 92):
MAGEAPFLYLYALVYFLQSINFVRIIMRLWLCWKCRSKNPLLYDANYFLCWHTNLAVFQSASKI
ITLKKRWQLALSKGVHFVCNLLLVTLKQGEIKDATPSDFVRATATIPIQASLPFGWLIVGVALLA
VRRPQGLPNNTASWFTALTQHGKEDLKFPRGQGVPINTNSSPDDQIGYYRRATRRIMACLVGLM
WLSYFIASFRLKKDKKKKADETQALPQRQKKQQTVTLLPAADLDDFSKQLQGNFGDQELIRQG
TDYKHWPQIAQFAPSASAFFGMSRIGMEVTPSGTWLTYTGAIKITSGDGTTSPISEHDYQIGGYTE
KWESGVKKMSGKGQQQQGQTVTKKSAAEASKKPRQKRTATKAYNVTQAFGRRGPEQTLLWP
VTLACFVLAAVYRINWFKDQVILLNKHIDAYKTFPPTEPKKDKKKKTSPARMAGNGGDAALAL
LLLDRLNQLESKMSGKGQKMKDLSPRWYFYYLGTGPEDCVVLHSYFTSDYYQLYSTQLSTDTG
VEHVTFFIYNKIVDEPEEHVQIHTIDGSSGGIIWVATEGALNTPKDHIGTRNPANNAAIVLQLPQG
TTLPKGFYAEGPGPGAKFVAAWTLKAAAGPGPGQYIKANSKFIGITELGPGPG-
SAM-SGP1-TCE5-SGP2-CTSpike_{G}F2P Nucleotide Sequence (SEQ ID NO: 93): (NT 1-17:
T7 promoter; NT 62-7543: VEEV non-structural protein coding region; NT 7518-7560: SGP1; NT
7582-7587 and 9541-9546: Kozak sequence; NT 7588-9474: TCE5 cassette; NT 9480-9540: SGP2; NT
9547-13368: CTSpike Furin-2P); See Sequence Listing.
ChAd-CMV-CTSpike_{G}F2P-CMV-TCE5 (EPE) Nucleotide Sequence (SEQ ID NO: 114);
See Sequence Listing.

### XIV.E. SARS-COV-2 Vaccine Produces Responses to Various Spike Constructs

[0594] ChAd and SAM vaccine platforms encoding various versions of the SARS-COV-2 Spike protein were assessed.

[0595] Versions of a Spike-encoding cassette featuring different sequence optimizations were assessed: “IDTSpike_{g}” (SEQ ID NO:69, also referred to as “Spike V1” or “v1”); “CTSpike_{g}”: (SEQ ID NO:79, also referred to as “Spike V2” or “v2”). As shown in FIG. 13, both ChAd (FIG. 13A) and SAM (FIG. 13B) vaccines produced detectable T cell responses (left panel), Spike-specific IgG antibodies (middle panel) and neutralizing antibodies (right panel). Notably, a ChAd vaccine encoding the CTSpike_{g} sequence version produced a 3-fold increased T cell response, 100-fold increased IgG production, and 60-fold increase in neutralizing antibody titer. Similarly, a SAM vaccine encoding the CTSpike_{g} sequence version produced an increased T cell response, 7-fold increase in IgG production, and 4-fold increase in neutralizing antibody titer. Accordingly, the data demonstrate sequence optimization of the Spike cassette produced an increased immune response across the multiple parameters assessed for each vaccine platform examined.

[0596] A version of a Spike-encoding cassette featuring modified Spike that includes removal of a furin site and addition of prolines in S2 domain was assessed: “CTSpikeF2P_{g}” (SEQ ID NO:89 and SEQ ID NO:90). As shown in FIG. 14, both ChAd (left panel) and SAM (right panel) vaccines encoding the F2P-modified Spike produced 5-fold and 20-fold Spike-specific IgG antibodies, respectively, relative to a corresponding “CTSpike_{g}” cassette that does not have the referenced modifications. Accordingly, the data demonstrate modification of the Spike cassette produced an increased antibody response for each vaccine platform examined.

### XIV.F. SARS-COV-2 Vaccine Produces Responses to T Cell Epitopes

[0597] ChAd and SAM vaccine platforms encoding various a modified SARS-COV-2 Spike protein and a T cell epitope (TCE) cassette encoding EDGE predicted epitopes (EPE) were assessed.

[0598] Both a modified Spike-encoding only cassette (“CTSpikeF2P_{g}” (SEQ ID NO:89) and modified Spike together with additional non-Spike T cell epitopes (ChAd SEQ ID NO:114; SAM SEQ ID NO:93; see Table 7 for “TCE5”), and immune responses assessed, as described above. As shown in FIG. 15, both ChAd (FIG. 15A) and SAM (FIG. 15B) each vaccine assessed produced detectable T cell responses to Spike (left panel), while vaccines including the TCE5 cassette also generally produced detectable T cell responses to the encoded T cell epitopes (right panel). Accordingly, the data demonstrate addition of a T cell epitope cassette led to broad T cell responses across the SARS-COV-2 Genome for each vaccine platform examined.

### XIV.G. Order of Cassettes in SARS-COV-2 Vaccine Influences Immune Response

[0599] SAM vaccine platforms encoding various orders of a modified SARS-COV-2 Spike protein and a T cell epitope (TCE) cassette encoding EDGE predicted epitopes (EPE) were assessed.

[0600] As shown in FIG. 16, T cell responses to Spike (top panel), T cell responses to the encoded T cell epitopes (middle panel), and Spike-specific IgG antibodies (bottom panel) were produced when vaccinated with various constructs. In FIG. 16A, SAM constructs included “IDTSpike_{g}” (SEQ ID NO:69) alone (left columns), IDTSpike_{g} expressed from a first subgenomic promoter followed by TCE5 expressed from a second subgenomic promoter (middle columns), or TCE5 expressed from a first subgenomic promoter followed by IDTSpike_{g} expressed from a second subgenomic promoter (right columns), with immune responses assessed, as described above. In FIG. 16B, SAM constructs included “IDTSpike_{g}” (SEQ ID NO:69) alone (first column), IDTSpike_{g} expressed from a first subgenomic promoter followed by TCE6 or TCE7 expressed from a second subgenomic promoter (columns 2 and 4, respectively), or TCE6 or TCE7 expressed from a first subgenomic promoter followed by IDTSpike_{g} expressed from a second subgenomic promoter (columns 3 and 5, respectively), with immune responses assessed, as described above. In FIG. 16C, SAM constructs included “CTSpike_{g}” (SEQ ID NO:79) alone (first column), CTSpike_{g} expressed from a first subgenomic promoter followed by TCE5 or TCE8 expressed from a second subgenomic promoter (columns 2 and 4, respectively), or TCE5 or TCE8 expressed from a first subgenomic promoter followed by CTSpike_{g} expressed from a second subgenomic promoter (columns 3 and 5, respectively), with immune responses assessed, as described above. Generally, and in particular for Spike, T cell responses were increased when the respective epitopes were expressed from the second subgenomic promoter, including increased Spike-directed T cell responses relative to Spike alone. A similar trend was also observed generally observed with increased Spike-specific IgG titers when the Spike antigen was expressed from the second subgenomic promoter except, for potentially the CTSpike_{g} constructs. Accordingly, the data demonstrate sequence order of antigen cassettes in vaccine platforms influenced immune responses.

### XIV.H. Additional SARS-COV-2 Vaccine Constructions

[0601] Vaccines were constructed to maximize the percentage of people getting predicted to achieve a total magnitude of greater than 1000 from validated epitopes. Briefly, magnitude was calculated across all validated epitopes in the starting proteins (e.g., Spike), as well as any added in the TCE cassettes according to the following with an expected approximate upper size limit of 600 amino acids beyond that of Spike: (1) An individual's magnitude is the sum of all epitope magnitudes across their respective diplotype alleles; (2) Each epitopes magnitude=(magnitude of response)×(Frequency of positive response/100), with values found in Tarke et al. (Comprehensive analysis of T cell immunodominance and immunoprevalence of SARS-COV-2 epitopes in COVID-19 cases. Cell Rep Med. 2021 Feb. 16; 2(2):100204. doi: 10.1016/j.xcrm.2021.100204. Epub 2021 Jan. 26.), herein incorporated by reference for all purposes; (3) epitopes other than those from starting proteins that span mutations with >5% frequency were excluded (see Table 8 for all mutations >1% frequency either overall or in specific strains), though mutations are allowed in flanking regions; and (4) cassette order was chosen to minimize unintended junction epitopes across adjacent frames, as well as minimize consecutive frames in the same protein to reduce chance of functional protein fragments, as described above.

[0602] The following constructions were produced: (A) “TCE10” starting with full Spike protein as the starting point and adding validated epitopes according to the above for a total size of 378 amino acids in addition to Spike (Table 9A, maps of epitopes covered in FIG. 17A-17F); (B) “TCE9” extended TCE10 and adding validated epitopes according to the above only if fully conserved between SARS and SARS-2 (e.g., as a pan-coronavirus vaccine), with certain frames extended (21 additional amino acids across all frames) to include additional predicted epitopes for alleles (i.e., not validated epitopes), for a total size of 556 amino acids in addition to Spike (Table 9B, maps of epitopes covered in FIG. 18A-18G); (C) “TCE11” starting with full Spike and Nucleocapsid proteins as the starting point and adding validated epitopes according to the above for a total size of 616 amino acids (197aa+full N) in addition to Spike (Table 9C, maps of epitopes covered in FIG. 19A-19D). Table 10A and Table 10B presents the magnitude coverage across various populations for each of TCE5, TCE9, TCE10, and TCE11 for SARS-CoV-2 and SARS/SARS-COV-2 conserved epitopes, respectively. Notably, each of the vaccine constructs cover greater than 89% of each of the indicated populations with a validated response magnitude greater than 1000 and greater than 95% with a validated response magnitude greater than 100, while TCE9 covers greater than 74% of each of the indicated populations with a validated response magnitude greater than 1000 for epitopes conserved between SARS and SARS-2. FIG. 20 presents the percentages of shared candidate 9-mer epitope distribution between SARS-COV-2 and SARS-COV (left panel) and between SARS-COV-2 and MERS (right panel), highlighting the significant number of conserved sequences outside of the Spike protein demonstrating the value of evaluating and including epitopes beyond those simply encoded by Spike, particularly with a goal of constructing a pan-coronavirus vaccine.

TABLE 8
Mutations >1% frequency either overall or in specific strains

| Gene | Position | Strain | Frequency |
|---|---|---|---|
| M | 70 | b117 | 0.014 |
| M | 155 | N501Y_early | 0.048 |
| M | 162 | N501Y_early | 0.048 |
| N | 3 | b117 | 0.999 |
| N | 13 | N501Y_early | 0.016 |
| N | 14 | N501Y_early | 0.016 |
| N | 67 | | 0.028 |
| N | 80 | P1 | 1 |
| N | 81 | N501Y_early | 0.033 |
| N | 151 | | 0.011 |
| N | 194 | | 0.056 |
| N | 199 | | 0.041 |
| N | 203 | b117 | 1 |
| N | 204 | b117 | 1 |
| N | 205 | N501Y_early | 1 |
| N | 220 | | 0.218 |
| N | 234 | | 0.033 |
| N | 235 | b117 | 0.999 |
| N | 359 | N501Y_early | 0.016 |
| N | 365 | | 0.021 |
| N | 373 | N501Y_early | 0.016 |
| N | 376 | | 0.029 |
| N | 377 | | 0.018 |
| N | 398 | | 0.015 |
| ORF3a | 15 | b117 | 0.089 |
| ORF3a | 38 | | 0.011 |
| ORF3a | 57 | N501Y_early | 0.982 |
| ORF3a | 90 | b117 | 0.02 |
| ORF3a | 131 | N501Y_early | 0.036 |
| ORF3a | 171 | N501Y_early | 0.589 |
| ORF3a | 172 | | 0.039 |
| ORF3a | 202 | | 0.012 |
| ORF3a | 223 | | 0.016 |
| ORF3a | 251 | | 0.017 |
| ORF3a | 259 | N501Y_early | 0.018 |
| S | 5 | | 0.012 |
| S | 18 | N501Y_early | 0.381 |
| S | 54 | N501Y_early | 0.016 |
| S | 69 | b117 | 1 |
| S | 70 | b117 | 1 |
| S | 80 | N501Y_early | 1 |
| S | 98 | | 0.012 |
| S | 144 | b117 | 1 |
| S | 215 | N501Y_early | 1 |
| S | 222 | | 0.198 |
| S | 241 | N501Y_early | 1 |
| S | 242 | N501Y_early | 1 |
| S | 243 | N501Y_early | 1 |
| S | 246 | N501Y_early | 0.016 |
| S | 262 | | 0.011 |
| S | 316 | N501Y_early | 0.016 |
| S | 384 | N501Y_early | 0.016 |
| S | 417 | N501Y_early | 0.984 |
| S | 439 | | 0.017 |
| S | 477 | | 0.048 |
| S | 484 | N501Y_early | 1 |
| S | 501 | b117 | 1 |
| S | 570 | b117 | 1 |
| S | 614 | b117 | 1 |
| S | 681 | b117 | 1 |
| S | 682 | cleavage | 1 |
| S | 683 | cleavage | 1 |
| S | 685 | cleavage | 1 |
| S | 688 | N501Y_early | 0.016 |
| S | 701 | N501Y_early | 1 |
| S | 706 | b117 | 0.018 |
| S | 716 | b117 | 1 |
| S | 982 | b117 | 1 |
| S | 1078 | N501Y_early | 0.016 |
| S | 1117 | N501Y_early | 0.016 |
| S | 1118 | b117 | 1 |
| S | 1150 | N501Y_early | 0.016 |
| nsp12 | 4577 | | 0.026 |
| nsp12 | 4646 | | 0.01 |
| nsp12 | 4715 | | 0.885 |
| nsp12 | 4815 | | 0.011 |
| nsp12 | 5112 | | 0.016 |
| nsp12 | 5168 | | 0.025 |
| nsp13 | 5542 | | 0.025 |
| nsp13 | 5585 | | 0.026 |
| nsp13 | 5614 | | 0.022 |
| nsp13 | 5784 | | 0.027 |
| nsp13 | 5922 | | 0.017 |
| nsp14 | 6054 | | 0.024 |
| nsp14 | 6426 | | 0.011 |
| nsp15 | 6485 | | 0.015 |
| nsp16 | 7014 | | 0.028 |
| nsp2 | 265 | | 0.132 |
| nsp2 | 300 | | 0.042 |
| nsp3 | 1001 | | 0.059 |
| nsp3 | 1113 | | 0.011 |
| nsp3 | 1246 | | 0.011 |
| nsp3 | 1361 | | 0.01 |
| nsp3 | 1708 | | 0.058 |
| nsp3 | 2230 | | 0.058 |
| nsp3 | 2501 | | 0.02 |
| nsp3 | 2606 | | 0.011 |
| nsp4 | 3087 | | 0.025 |
| nsp5 | 3278 | | 0.016 |
| nsp5 | 3352 | | 0.034 |
| nsp5 | 3353 | | 0.013 |
| nsp5 | 3371 | | 0.013 |
| nsp6 | 3606 | | 0.056 |
| nsp6 | 3675 | | 0.064 |
| nsp6 | 3676 | | 0.064 |
| nsp6 | 3677 | | 0.064 |
| nsp6 | 3711 | | 0.015 |
| nsp7 | 3884 | | 0.01 |
| nsp9 | 4241 | | 0.016 |

TABLE 9A
TCE10 Cassette (Order of Frames as Shown)

| | Frame Start | Frame End | | SEQ |
|---|---|---|---|---|
| Gene | in Gene | in Gene | Frame sequence | ID NO: |
| N | 356 | 378 | HIDAYKTFPPTEPKKDKKKKADE | 27944 |
| ORF3a | 133 | 149 | CRSKNPLLYDANYFLCW | 27945 |
| nsp3 | 1632 | 1660 | FEYYHTTDPSFLGRYMSALNHTKKWKYPQ | 27946 |
| nsp3 | 1360 | 1377 | ISNEKQEILGTVSWNLRE | 27947 |
| M | 160 | 203 | DIKDLPKEITVATSRTLSYYKLGASQRVAGDSGFA | 27948 |
| | | | AYSRYRIGN | |
| ORF3a | 29 | 52 | VRATATIPIQASLPFGWLIVGVAL | 27949 |
| nsp4 | 3111 | 3134 | YLTFYLTNDVSFLAHIQWMVMFTP | 27950 |
| M | 89 | 109 | GLMWLSYFIASFRLFARTRSM | 27951 |
| nsp12 | 4553 | 4571 | DWYDFVENPDILRVYANLG | 27952 |
| nsp3 | 1919 | 1935 | PYPNASFDNFKFVCDNI | 27953 |
| nsp12 | 4806 | 4826 | NFNKDFYDFAVSKGFFKEGSS | 27954 |
| nsp12 | 4728 | 4745 | DGVPFVVSTGYHFRELGV | 27955 |
| nsp4 | 2850 | 2876 | ACPLIAAVITREVGFVVPGLPGTILRT | 27956 |
| nsp3 | 2745 | 2761 | ATTRQVVNVVTTKIALK | 27957 |
| N | 318 | 337 | SRIGMEVTPSGTWLTYTGAI | 27958 |
| M | 61 | 77 | TLACFVLAAVYRINWIT | 27959 |
| N | 96 | 117 | GGDGKMKDLSPRWYFYYLGTGP | 27960 |

TABLE 9B
TCE9 Cassette (Order of Frames as Shown)

| | Frame Start | Frame End | | SEQ |
|---|---|---|---|---|
| Gene | in Gene | in Gene | Frame sequence | ID NO: |
| nsp12 | 4719 | 4745 | GPLVRKIFVDGVPFVVSTGYHFRELGV | 27961 |
| nsp4 | 3096 | 3134 | PVYSFLPGVYSVIYLYLTFYLTNDVSFLAHIQWMV | 27962 |
| | | | MFTP | |
| M | 89 | 109 | GLMWLSYFIASFRLFARTRSM | 27951 |
| nsp12 | 4888 | 4905 | NNLDKSAGFPFNKWGKAR | 27963 |
| nsp3 | 2745 | 2761 | ATTRQVVNVVTTKIALK | 27957 |
| M | 61 | 79 | TLACFVLAAVYRINWITGG | 27964 |
| nsp3 | 1919 | 1935 | PYPNASFDNFKFVCDNI | 27953 |
| nsp3 | 2676 | 2692 | TYNKVENMTPRDLGACI | 27965 |
| ORF3a | 29 | 52 | VRATATIPIQASLPFGWLIVGVAL | 27949 |
| nsp12 | 4806 | 4826 | NFNKDFYDFAVSKGFFKEGSS | 27954 |
| N | 96 | 117 | GGDGKMKDLSPRWYFYYLGTGP | 27960 |
| nsp12 | 5213 | 5234 | KQGDDYVYLPYPDPSRILGAGC | 27966 |
| N | 356 | 378 | HIDAYKTFPPTEPKKDKKKKADE | 27944 |
| ORF3a | 133 | 149 | CRSKNPLLYDANYFLCW | 27945 |
| nsp6 | 3643 | 3668 | SLATVAYFNMVYMPASWVMRIMTWLD | 27967 |
| nsp12 | 4529 | 4545 | GNCDTLKEILVTYNCCD | 27968 |
| nsp3 | 1630 | 1660 | EAFEYYHTTDPSFLGRYMSALNHTKKWKYPQ | 27969 |
| nsp3 | 1360 | 1377 | ISNEKQEILGTVSWNLRE | 27947 |
| M | 160 | 203 | DIKDLPKEITVATSRTLSYYKLGASQRVAGDSGFA | 27948 |
| | | | AYSRYRIGN | |
| N | 301 | 337 | WPQIAQFAPSASAFFGMSRIGMEVTPSGTWLTYTG | 27970 |
| | | | AI | |
| nsp12 | 4553 | 4571 | DWYDFVENPDILRVYANLG | 27952 |
| nsp4 | 2850 | 2909 | ACPLIAAVITREVGFVVPGLPGTILRTTNGDFLHELP | 27971 |
| | | | RVFSAVGNICYTPSKLIEYTDFA | |

TABLE 9C
TCE11 Cassette (Order of Frames as Shown)

| | Frame Start | Frame End | | |
|---|---|---|---|---|
| Gene | in Gene | in Gene | Frame sequence | SEQ ID NO: |
| nsp12 | 4896 | 4826 | NVAFQTVKPGNFNKDFYDFAVSKGFFKEGSS | 27972 |
| M | 182 | 203 | GASQRVAGDSGFAAYSRYRIGN | 27973 |
| nsp12 | 4728 | 4745 | DGVPFVVSTGYHFRELGV | 27955 |
| nsp4 | 3111 | 3134 | YLTFYLTNDVSFLAHIQWMVMFTP | 27950 |
| M | 89 | 109 | GLMWLSYFIASFRLFARTRSM | 27951 |
| nsp3 | 1632 | 1660 | FEYYHTTDPSFLGRYMSALNHTKKWKYPQ | 27946 |
| nsp3 | 1360 | 1377 | ISNEKQEILGTVSWNLRE | 27947 |
| nsp3 | 2745 | 2761 | ATTRQVVNVVTTKIALK | 27957 |
| M | 61 | 77 | TLACFVLAAVYRINWIT | 27959 |

TABLE 10A
Population Coverages for SARS-CoV-2 Validated
Epitopes (Excluding mutations >5%)

| Cassette | Magnitude | Starting Protein(s) | AFA | API | EUR | HIS | Mean | Min |
|---|---|---|---|---|---|---|---|---|
| Spike | 1 | S | 0.95 | 0.89 | 1 | 0.98 | 0.95 | 0.89 |
| S + N + TCE11 | 1 | S, N | 0.97 | 0.95 | 1 | 0.99 | 0.98 | 0.95 |
| S + TCE10 | 1 | S | 0.97 | 0.95 | 1 | 0.99 | 0.98 | 0.95 |
| S + TCE9 | 1 | S | 0.97 | 0.95 | 1 | 0.99 | 0.98 | 0.95 |
| S + TCE5 | 1 | S | 0.95 | 0.95 | 1 | 0.98 | 0.97 | 0.95 |
| Spike | 100 | S | 0.92 | 0.86 | 1 | 0.96 | 0.93 | 0.86 |
| S + N + TCE11 | 100 | S, N | 0.95 | 0.95 | 1 | 0.99 | 0.97 | 0.95 |
| S + TCE10 | 100 | S | 0.95 | 0.95 | 1 | 0.99 | 0.97 | 0.95 |
| S + TCE9 | 100 | S | 0.95 | 0.95 | 1 | 0.99 | 0.97 | 0.95 |
| S + TCE5 | 100 | S | 0.92 | 0.94 | 1 | 0.97 | 0.96 | 0.92 |
| Spike | 1000 | S | 0.6 | 0.62 | 0.91 | 0.75 | 0.72 | 0.6 |
| S + N + TCE11 | 1000 | S, N | 0.89 | 0.92 | 1 | 0.96 | 0.94 | 0.89 |
| S + TCE10 | 1000 | S | 0.9 | 0.92 | 1 | 0.97 | 0.95 | 0.9 |
| S + TCE9 | 1000 | S | 0.9 | 0.92 | 1 | 0.97 | 0.95 | 0.9 |
| S + TCE5 | 1000 | S | 0.68 | 0.7 | 0.93 | 0.8 | 0.78 | 0.68 |
| Spike | 2000 | S | 0.39 | 0.49 | 0.73 | 0.56 | 0.54 | 0.39 |
| S + N + TCE11 | 2000 | S, N | 0.66 | 0.72 | 0.96 | 0.82 | 0.79 | 0.66 |
| S + TCE10 | 2000 | S | 0.72 | 0.73 | 0.96 | 0.85 | 0.81 | 0.72 |
| S + TCE9 | 2000 | S | 0.76 | 0.77 | 0.98 | 0.9 | 0.85 | 0.76 |
| S + TCE5 | 2000 | S | 0.49 | 0.54 | 0.81 | 0.66 | 0.62 | 0.49 |

TABLE 10B
Population Coverages for Validated Conserved Epitopes
between SARS and SARS-CoV-2 (Excluding mutations >5%)

| Cassette | Magnitude | Starting Protein(s) | AFA | API | EUR | HIS | Mean | Min |
|---|---|---|---|---|---|---|---|---|
| Spike | 1 | S | 0.74 | 0.82 | 0.98 | 0.91 | 0.87 | 0.74 |
| S + N + TCE11 | 1 | S, N | 0.89 | 0.93 | 1 | 0.97 | 0.95 | 0.89 |
| S + TCE10 | 1 | S | 0.94 | 0.93 | 1 | 0.97 | 0.96 | 0.93 |
| S + TCE9 | 1 | S | 0.94 | 0.93 | 0.99 | 0.97 | 0.96 | 0.93 |
| S + TCE5 | 1 | S | 0.87 | 0.91 | 0.99 | 0.95 | 0.93 | 0.87 |
| Spike | 100 | S | 0.74 | 0.78 | 0.98 | 0.89 | 0.85 | 0.74 |
| S + N + TCE11 | 100 | S, N | 0.89 | 0.91 | 0.99 | 0.95 | 0.94 | 0.89 |
| S + TCE10 | 100 | S | 0.94 | 0.93 | 0.99 | 0.97 | 0.96 | 0.93 |
| S + TCE9 | 100 | S | 0.94 | 0.92 | 0.99 | 0.97 | 0.96 | 0.92 |
| S + TCE5 | 100 | S | 0.86 | 0.88 | 0.98 | 0.93 | 0.91 | 0.86 |
| Spike | 1000 | S | 0.18 | 0.2 | 0.46 | 0.27 | 0.28 | 0.18 |
| S + N + TCE11 | 1000 | S, N | 0.49 | 0.67 | 0.76 | 0.62 | 0.63 | 0.49 |
| S + TCE10 | 1000 | S | 0.52 | 0.56 | 0.71 | 0.55 | 0.59 | 0.52 |
| S + TCE9 | 1000 | S | 0.74 | 0.81 | 0.92 | 0.84 | 0.83 | 0.74 |
| S + TCE5 | 1000 | S | 0.33 | 0.42 | 0.62 | 0.49 | 0.47 | 0.33 |
| Spike | 2000 | S | 0.01 | 0.03 | 0.08 | 0.03 | 0.04 | 0.01 |
| S + N + TCE11 | 2000 | S, N | 0.24 | 0.2 | 0.41 | 0.28 | 0.28 | 0.2 |
| S + TCE10 | 2000 | S | 0.2 | 0.15 | 0.34 | 0.17 | 0.21 | 0.15 |
| S + TCE9 | 2000 | S | 0.4 | 0.37 | 0.7 | 0.51 | 0.49 | 0.37 |
| S + TCE5 | 2000 | S | 0.21 | 0.11 | 0.34 | 0.24 | 0.22 | 0.11 |

XIV.I. SARS-COV-2 Prime-Boost Regimens Featuring Spike Proteins from Different SARS-COV-2 Subtype Isolates Produces Responses to Spike in Non-Human Primates

[0603] ChAd and SAM vaccine platforms encoding different subtype isolates of the SARS-CoV-2 Spike protein were assessed in Indian rhesus macaques as part of homologous or heterologous prime/boost regimens, as shown in FIG. 36 and presented in Table 11.

TABLE 11
NHP Study Design for SARS-CoV-2 Isolate Vaccine Regimens

| Group # | Prime (week 0) | Boost 1 (week 6 or 8) | Boost 2 (week 30) |
|---|---|---|---|
| 1 | SAM-S_{D614G}; 300 ug | SAM-S_{D614G}; 300 ug | ChAd-S_{B1351}-TCE5; 5e11 vp |
| 2 | SAM-S_{D614G}; 30 ug | SAM-S_{D614G}; 30 ug | SAM-TCE5-S_{B1351}; 30 ug |
| 5 | ChAd-S_{D614G}; 1e12 vp | SAM-S_{D614G}; 100 ug | SAM-TCE5-S_{B1351}; 30 ug |
| 6 | ChAd.S_{D614G}; 5e10 vp | SAM-S_{D614G}; 100 ug | ChAd-S_{B1351}-TCE5; 5e11 vp |

Prime: ChAdV - “CTSpike_{g}” (SEQ ID NO: 79); SAM - “IDTSpike_{g}” (SEQ ID NO: 69)
Boost 1: SAM - “IDTSpike_{g}” (SEQ ID NO: 69)
Boost 2: all CT-F2P versions of Spike variant B.1.351; TCE5 see Table 7

[0604] NHPs were first immunized with a priming dose of either a ChAd platform including a Spike-encoding cassette featuring “ChAd-S_{D614G}; CT” (SEQ ID NO:79) or a SAM platform including a Spike-encoding cassette featuring “SAM-S_{D614G}; IDT” (SEQ ID NO:69) at the indicated doses. NHPs were then administered a first boost at weeks 6 or 8 with the SAM platform including a Spike-encoding cassette featuring “SAM-S_{D614G}; IDT” at the indicated doses. NHPs were then administered a second boost at week 30 with either a ChAd platform including a B.1.351 Spike variant-encoding cassette featuring Cool Tool sequence optimization (“CT”) and the F2P modification described herein (“F2P”) [SEQ ID NO:112] or a SAM platform including the same B.1.351 Spike variant (each platform also included the TCE5 T cell epitope cassette, see Table 7, in the orientation shown). The ChAdV antigen cassette is shown in SEQ ID NO:113. NHPs were monitored over time, as described herein.

[0605] As shown in FIGS. 37A, 37B, 37C, and 37D, the various vaccine regimens (Groups 1, 2, 5, and 6, respectively) produced T cell responses across multiple Spike T cell epitope pools (top panels). T cell responses for individual NHPs directed to a single large Spike T cell epitope pool was heterogenous (middle panels and summarized in FIG. 38 top panel), with each boost generally producing an increased T cell response, including production of a robust response in some (e.g., two NHPs in Group 1 following Boost 2). Spike-specific IgG antibody titers were detected and increased following each boost (bottom panels and summarized in FIG. 38 bottom panel) in all five NHP animals assessed. T cell responses to the TCE5-encoded epitopes, though generally small, trended upwards following Boost 2 (the first administration of a vaccine including TCE5), with generally stronger responses with administration of the ChAdV platform vaccine (FIG. 38 middle panel). Accordingly, the data demonstrate a vaccine regimen including a boost with a Spike variant encoding vaccine produced T cell and antibody responses.

[0606] Antibody responses were further assessed for neutralizing antibody production to both the D614G pseudovirus and B.1.351 pseudovirus. As shown in FIG. 39, neutralizing antibody (Nab) titers against the D614G pseudovirus were detected following Boost 1 across the four groups, with Nab titers generally the same following Boost 2 (left panels). Following Boost 1, cross-neutralizing antibody titers against the B.1.351 pseudovirus, while detected, were distinctly lower than the Nab titer against the D614G pseudovirus (right panel, column 1). However, following administration of Boost 2 encoding the B.1.351 spike variant, Nab titers against the B.1.351 pseudovirus were noticeably increased (right panels, column 2), notably with similar Nab titer levels to that against the D614G pseudovirus following Boost 1. These results are further demonstrated in FIG. 40, comparing the relative Nab titer levels against each of the pseudoviruses illustrating the reduced cross-neutralizing capacity against the B. 1.351 pseudovirus following Boost 1 (top panels) and rescuing of the same following Boost 2 (bottom panels) across each of the vaccine regimens assessed. FIG. 41 shows T cell responses (left panel) and Nab titer levels (right panel) for Rhesus macaques immunized twice with SAM encoding SARS-COV-2 Spike antigen at a specified dose of either 30 μg or 300 μg, with 30 μg doses producing a more robust response.

[0607] The data demonstrate the various vaccine regimens produced both T cell and antibody responses against the encoded antigens in NHPs, notably demonstrating subsequent immunization with Spike variant encoding vaccines noticeably improved Nab titers against the respective variant pseudovirus.

### XIV.J. Multivalent Pancorona Immunogen (Full Length Spike, RBDs & TCEs) Design Based on Sequence Analysis & T-Cell Epitope Prediction Overview

[0608] Vaccine candidates were developed to provide broad immunogenicity against viruses in the Sarbecovirus subgenus, which includes the human pathogens SARS-COV and SARS-CoV-2. Vaccine candidates were constructed to induce both broadly neutralizing antibodies and CD8+ T-cell responses to increase protection against diverse Sarbecoviruses. For that purpose, two classes of vaccine cassettes were developed: the first to elicit cross-neutralizing anti-Spike and anti-RBD antibodies capable of preventing infection, and the second to generate broad CD8+ T-cell responses to conserved T-cell epitopes, capable of quickly destroying infected cells thereby limiting infection severity.

[0609] A summary of the relevant findings from the results below are as follows:
[0610] Sarbecovirus-RBDs were expressed from SAM vectors with different Trimerization domains and assembled into Trimers in vitro, which mirrors the likely natural trimerization conformation of full length spike proteins, presenting the immunogens in a desired format for immunogenicity purposes
[0611] Vaccination with single RBD and blended multi-RBDs SAM vaccines generated antibody and neutralizing immunity to targeted RBD proteins, and also to proteins not directly targeted by the vaccines
[0612] The 3 vaccine groups results suggest induction of comparable immunity
[0613] Neutralizing immunity significantly increased by homologous boosting of blended SAMs, even to target bat species not originally included in the vaccine
[0614] Pre-existing SARS-COV-2 or SARS-1 immunity led to greater breath of immune response with a single vaccination with the pooled SAM-vectors
[0615] A single SAM vector expressing a SARS-COV2 spike and 3×RBDs from groups 1, 2 and 3 induced immunity to multiple RBDS and neutralizing titers beyond those targeted by the vaccine
[0616] A single ChAd vector expressing a SARS-COV2 spike and 3×RBDs from group 2 induced broad neutralizing immunity to multiple viruses that is improved by SAM boosting
[0617] TCE demonstrated expression by RT-QPCR with TCE12 having the best expression of the TCEs evaluated
[0618] TCE12 and TCE13 induced potent T-cell immunity in mice to multiple conserved Nsp proteins and SAM-TCE12 induced a comparable immune response to ChAd-TCE12

### XIV.K. Multivalent Pancorona Immunogen Assessment Methods

### Cloning of Single RBD Constructs

[0619] RBDs were cloned by Gibson assembly into SAM and ChAd vaccine vectors for in vitro and in vivo testing, and into pCDNA3 expression vectors to generate reagents for immunodetection. RBD domains from Arg319 to Phe541 (Wuhan-SARS-COV2 numbering or equivalent amino acids) were selected for cloning which contains the core RBD domain between 333-527 amino acids (Wuhan SARS-COV-2 numbering) (Lan et al. 220 Nature 581:215-22).

[0620] RBD sequences were codon optimized using the COOL algorithm and were synthesized as gBlocks by IDT. Trimerization domains were introduced initially on the gBlocks but additional trimerization domains for each RBD were introduced by overlapping PCR extension. RBDs were then assembled into PacI/BstBI linearized pUC02-ATG-VEE linearized backbones by Gibson assembly. A subset of RBDs were moved from SAM to ChAd using primers to introduce overlapping regions needed for constructs assembly into AsiSI/PmeI restriction sites.

[0621] For pCNA3 cloning the RBD was first amplified by PCR to introduce overlapping domains for assembly and to introduce a C-terminus 6-Histidine residue domain for protein purification and then cloned into the BsRGI/HindIII site. Protein was expressed from the pCDNA3 plasmids using a 293Expi expression system and RBDs were purified using a Nickel column by FPLC.

### In Vitro Expression of RBDs and Westerns

[0622] One μg of SAM RNA was transfected for each construct under evaluation. HEK293A cells were seeded at 2.5e5 cells/well of a 24 well plate and incubated overnight. The next day, 1 μg of RNA was transfected using Lipofectamine Messenger Max (Thermofisher) according to the manufacturer's instructions. Media and pellets were harvested and Laemmli buffer was added to 1X. For the reduced samples Laemmli, 1 mM DTT and 4M Urea were added to the media. Reduced samples were also heated to 95 C for 5 minutes while the non-reduced samples were analyzed unheated. Samples were separated on a 4-20% SDS-PAGE gel and transferred to a PVDF membrane. Membranes were blocked in 5% Skim milk TBST and then probed with a rabbit anti-RBD polyclonal antibody (SinoBiologicals) or an anti-His Tag monoclonal antibody (Invitrogen). Antibody binding was detected with either a HRP-labeled anti-rabbit or anti-mouse secondary antibody (Bethyl Labs). Signal was detected using a Chemiluminescent substrate (Thermoscientific).

### In Vitro Evaluation of TCE Expression by RT-qPCR

[0623] For each construct, 1e6 293F cells were infected with the corresponding ChAdV-TCE virus at an MOI of 1. After 48 hours, the cells were harvested for RNA extraction and purification. The purified RNA from each construct was used to generate cDNA via reverse transcription. 1 ng of cDNA for each construct was used as a template for two separate qPCR reactions (done in triplicate); a FAM coupled primer set targeting the PADRE sequence and a FAM coupled primer set targeting b-Actin as a normalizing control.

[0624] To determine the expression of PADRE for each construct relative to the expression of actin, the CT value of the b-Actin reaction was subtracted from the average value of the PADRE reaction to provide the deltaCT (dCT) value for each construct. The dCT value for the untransduced control was subtracted from the dCT values for each construct to provide the double deltaCT (ddCT) value for each construct. To determine the relative level of PADRE expression above the baseline seen in the untransduced control, the ddCT values were converted to expression levels above baseline via the following formula: Relative PADRE expression level=2^{-(ddCT)}. The relative PADRE expression levels shown are shown as a proportion of the highest relative PADRE expression level, seen in the GRT-C903 positive control.

### Pseudovirus Neutralization Assay (PNA)

[0625] Mouse sera samples were assessed using a pseudovirus assay. Five sarbecovirus (Human SARS-COV2, Human SARS-COV1, bat MK211376, bat WIV-1, bat RSSHC014, bat Rs/TG13, and Pangolin GX-P2V) pseudotyped virus particles were made using a genetically modified Vesicular Stomatitis Virus from which the glycoprotein G was removed (VSVAG). The VSVAG virus was transduced in HEK293T cells previously transfected with the spike glycoprotein of the SARS-COV-2 coronavirus (Wuhan strain) for which the last 19 amino acids of the cytoplasmic tail were removed (ΔCT). The generated pseudovirus particles (VSVΔG-Spike ΔCT) contained a luciferase reporter which could be quantified in relative luminescence units (RLU). Heat-inactivated serum samples were serially diluted (7-serial 2-fold dilution) in a 96-well plate and a pre-determined amount of pseudotyped virus (corresponding to approximately 150,000 RLU/well) was applied to the plate and incubated with scrum/plasma to allow binding of the neutralization antibodies to the pseudotyped virus.

[0626] After the incubation of the serum/plasma-pseudotyped virus complex, the scrum/plasma-pseudotyped virus complex was transferred to the plate containing Vero E6 cells (ATCC). Test plates were incubated at 37° C. with 5% CO2 overnight. Luciferase substrate was added to the plates which were then read using a plate reader detecting luminescence. The intensity of the light being emitted is inversely proportional to the amount of anti-SARS-COV-2 Pre-Spike antibodies bound to the VSVΔG-Spike ΔCT particles.

[0627] Each microplate was read using a luminescence microplate reader (SpectraMax). The dilution of serum required to achieve 50% neutralization (NT50) when compared to a non-neutralized pseudoparticle control was calculated for each sample dilution and the NT50 is interpolated from a linear regression using the two dilutions flanking the 50% neutralization.

### Anti-RBD MSD ELISA

[0628] 96-well QuickPlex plates (Meso Scale Discovery, Rockville, MD) were coated with 50 μL of 1 μg/mL SARS-COV-2 S1 (ACROBiosystems, Newark, DE) or 15 Sarbecovirus RBDs (produced by expression of 6-His tagged RBD proteins using a pCDNA3 plasmid in 293Expi expression system), diluted in DPBS (Corning, Corning, NY), and incubated at 4° C. overnight. Wells were washed three times with agitation using 250 μL of PBS+0.05% Tween-20 (Teknova, Hollister, CA) and plates blocked with 150 μL Superblock PBS (Thermo Fisher Scientific, Waltham, MA) for 1 hour at room temperature on an orbital shaker. Test sera was diluted at appropriate series in 10% species-matched serum (Innovative Research, Novi, MI) and tested in single wells on each plate. Wells were washed and 50 μL of the diluted samples were added to wells and incubated for 1 hour at room temperature on an orbital shaker. Wells were washed and incubated with 25 μL of 1 μg/mL SULFO-TAG labeled anti-mouse antibody (MSD), diluted in DPBS+1% BSA (Sigma-Aldrich, St. Louis, MO), for 1 hour at room temperature on an orbital shaker. Wells were washed and 150 μL tripropylamine containing read buffer (MSD) added. Plates were run immediately using the QPlex SQ 120 (MSD) ECL plate reader.

### TCE ELISpot

[0629] IFNγ ELISpot assays were performed using pre-coated 96-well plates (MAbtech, Mouse IFNγ ELISpot PLUS, ALP) following manufacturer's protocol. Samples were stimulated overnight with different overlapping 15mer peptide pools spanning the entirety of various NSP epitope frames used in the vaccine cassettes (8, 12, 13, 14) and NC, 15 amino acid peptides per pool, with 11 amino acid overlap (JPT Peptide Technologies and GenScript). All peptide pools were used at a final concentration of 1 mg/mL per peptide. Splenocytes were plated at 1×10⁵ cells per well for TCE pools in the initial ChAd experiment with the exception that in the SAM versus ChAd-TCE12 experiment NSP12 pulsed cells were plated in duplicate at 2.5×10⁴ cells per well (mixed with 7.5×10⁴ naïve cells). DMSO only control was plated for each sample and cell number. Following overnight incubation at 37° C., plates were washed with PBS and incubated with anti-mouse IFNγ mAb biotin (MAbtech) for two hours, followed by an additional wash and incubation with Streptavidin-ALP (MAbtech) for one hour. After final wash, plates were incubated for ten minutes with BCIP/NBT (MAbtech) to develop the immunospots. Spots were imaged and enumerated using an AID reader (Autoimmun Diagnostika). For data processing and analysis, samples with replicate well variability (Variability=Variance/(median+1)) greater than 10 and median greater than 10 were excluded. Spot values were adjusted based on the well saturation according to the formula: AdjustedSpots=RawSpots+2*(RawSpots*Saturation/(100−Saturation). Wells with well saturation values greater than 39% were labeled as “too numerous to count” (TNTC) and set to the maximum measured value (8,000 SFU/10⁶ for samples plated at 1×10⁵ cells/well and 27,000 SFU/10⁶ for samples plated at 25,000 cells/well). Each sample was background corrected by subtracting the average value of the negative control peptide wells. Data processing performed with R programming language and graphed with GraphPad Prism 9. Data is presented as spot forming units (SFU) per 1×10⁶ splenocytes.

### XIV.L. SARS-COV-2 Spike and Multi-RBD Cassette Design

[0630] The design for these target RBDs was based on multiple alignment analysis of 75 high quality Sarbecovirus Spike sequences from NCBI. The genetic distances between any two viruses were inferred from the alignment. As outlined in FIG. 21, a statistical model selected three RBD sequences from the collection with the objective that the three RBDs together with the SARS-COV-2 RBD sequence provide the most diverged group of sequences, such that the average distance between any virus to the most similar virus in the selected RBD group was smallest. This optimization strategy considers that any newly emerging Sarbecovirus is likely to be sufficiently similar to any of the RBD sequences in the cassette such that they can be neutralized by the breadth of the antibodies elicited by a vaccine encoding the selected RBDs. Different RBD domains were used for selection based on having different properties. The RBM is the most variable region of the RBD while the area outside of the RBM is more conserved. Without wishing to be bound by theory, selecting RBDs based on the RBM alone can result in selection based on the most varied domain, while choosing based on the RBD sequence outside of the RBM (RBDΔRBM) can result in a selection based on the conservative domain. Both selection criteria have potential advantages. More conserved regions may be better immunogens for antibodies that recognize multiple coronaviruses. Selection based on RBM may provide greater coverage to diverse RBMs. The whole RBD group can combine the advantages of both, but is potentially biased to the conserved domains.

[0631] Using this distance model, three unique combinations of RBD candidates were selected based on the following sequences: 1) whole RBD sequence (FIG. 22A), 2) RBD sequence with the RBM sequence excluded (RBDΔRBM; FIG. 22B), and 3) RBM sequence alone (FIG. 22C). The selected RBDs are described in Table 12.

TABLE 12
Selected RBD Components

| Group 1: Whole RBD | Group 2: RBDΔRBM | Group 3: RBM Alone |
|---|---|---|
| SARS-like | BtCoV/273/2005/ | HKU3-7 (Bat) |
| YNLF_34C/Bat/2013 | BAT2005 | GenBank# GQ153542 |
| GenBank# KP886809 | GenBank# DQ648856 | |
| GX2013/BAT/2013 | GX2013/BAT/2013 | Yunnan2011/Bat/2011 |
| GenBank# KJ473815 | GenBank# KJ473815 | GenBank# JX993988.1 |
| YN2018B/Bat/2016 | YN2018B/Bat/2016 | SARS Tor2/Human/2002 |
| GenBank# MK211376 | GenBank# MK211376 | GenBank# NC_004718 |

[0632] The sarbecovirus clade designations of representative analyzed isolates, including those with the selected RBDs, is shown in FIG. 23, with “V1”, “V2”, and “V3” referring to vaccine Groups 1-3, respectively, and circles indicating viruses for which PNA exists (see below). Clade designation was according to Letko et al. 2020 (Nature Microbiology volume 5, pages 562-569 (2020)). FIG. 24 shows RBD amino acid similarity for representative analyzed isolates, including those with the selected RBDs. Table 13 below presents the sequence identity of the best matching component (distinct RBD domain) of each vaccine set for particular viruses of interest. Tables 14A to 14C presents the pairwise sequence identity across the shown isolates for each of: the full-length RBD (Tables 14A); the RBDΔRBM (Tables 14B); the RBM alone (Tables 14C).

TABLE 13
Percent Identity to Viruses of Interest

| Group 1: Whole RBD | Group 2: RBDΔRBM | Group 3: RBM Alone |
|---|---|---|
| 74% identity to clade 3 | 74% identity to clade 3 | 74% identity to clade 3 |
| virus, BM48 | virus, BM48 | virus, BM48 |
| 98% identity to clade 1 | 98% identity to clade 1 | 95% identity to clade 1 |
| virus, WIV1 | virus, WIV1 | virus, WIV1 |
| 85% identity to clade 1 | 85% identity to clade 1 | 82% identity to clade 1 |
| virus, RsSH | virus, RsSH | virus, RsSH |
| 96% identity to clade 1 | 96% identity to clade 1 | 100% identity to clade 1 |
| virus SARS-1 | virus SARS-1 | virus SARS-1 |
| 90% identity to clade 2 | 90% identity to clade 2 | 91% identity to clade 2 |
| virus, YN2013 | virus, YN2013 | virus, YN2013 |

TABLE 14A
Percent Identity of RBD Domains

| | NC_045512.2 | NC_004718.3 | MT121216.1 | DQ648857.1 | GQ153542.1 | DQ648856.1 | AY278489.2 | GQ153540.1 |
|---|---|---|---|---|---|---|---|---|
| NC_045512.2 | 1 | 0.730942 | 0.96861 | 0.64574 | 0.650224 | 0.636771 | 0.730942 | 0.650224 |
| NC_004718.3 | 0.730942 | 1 | 0.73991 | 0.636771 | 0.636771 | 0.641256 | 0.986547 | 0.636771 |
| MT121216.1 | 0.96861 | 0.73991 | 1 | 0.641256 | 0.64574 | 0.632287 | 0.73991 | 0.64574 |
| DQ648857.1 | 0.64574 | 0.636771 | 0.641256 | 1 | 0.928251 | 0.874439 | 0.627803 | 0.928251 |
| GQ153542.1 | 0.650224 | 0.636771 | 0.64574 | 0.928251 | 1 | 0.878924 | 0.627803 | 0.973094 |
| DQ648856.1 | 0.636771 | 0.641256 | 0.632287 | 0.874439 | 0.878924 | 1 | 0.632287 | 0.883408 |
| AY278489.2 | 0.730942 | 0.986547 | 0.73991 | 0.627803 | 0.627803 | 0.632287 | 1 | 0.627803 |
| GQ153540.1 | 0.650224 | 0.636771 | 0.64574 | 0.928251 | 0.973094 | 0.883408 | 0.627803 | 1 |
| MN996532.2 | 0.901345 | 0.748879 | 0.896861 | 0.650224 | 0.650224 | 0.627803 | 0.748879 | 0.650224 |
| KJ473811.1 | 0.641256 | 0.636771 | 0.636771 | 0.878924 | 0.883408 | 0.941704 | 0.627803 | 0.887892 |
| NC_014470.1 | 0.704036 | 0.726457 | 0.713004 | 0.641256 | 0.632287 | 0.654709 | 0.726457 | 0.636771 |
| KC881005.1 | 0.757848 | 0.820628 | 0.7713 | 0.641256 | 0.64574 | 0.641256 | 0.820628 | 0.64574 |
| MK211377.1 | 0.654709 | 0.654709 | 0.650224 | 0.950673 | 0.928251 | 0.896861 | 0.64574 | 0.932735 |
| KJ473816.1 | 0.632287 | 0.632287 | 0.627803 | 0.901345 | 0.914798 | 0.910314 | 0.627803 | 0.910314 |
| MK211376.1 | 0.748879 | 0.955157 | 0.762332 | 0.641256 | 0.64574 | 0.650224 | 0.955157 | 0.64574 |
| AY572034.1 | 0.73991 | 0.96861 | 0.748879 | 0.636771 | 0.636771 | 0.641256 | 0.964126 | 0.636771 |
| KP886809.1 | 0.64574 | 0.641256 | 0.641256 | 0.878924 | 0.878924 | 0.973094 | 0.632287 | 0.887892 |
| MT072864.1 | 0.860987 | 0.744395 | 0.874439 | 0.654709 | 0.659193 | 0.636771 | 0.748879 | 0.64574 |
| KF569996.1 | 0.735426 | 0.941704 | 0.748879 | 0.641256 | 0.64574 | 0.650224 | 0.941704 | 0.64574 |
| JX993987.1 | 0.654709 | 0.650224 | 0.650224 | 0.959641 | 0.928251 | 0.892377 | 0.641256 | 0.932735 |
| MK211378.1 | 0.632287 | 0.632287 | 0.627803 | 0.946188 | 0.932735 | 0.887892 | 0.623318 | 0.93722 |
| MK211374.1 | 0.650224 | 0.636771 | 0.64574 | 0.93722 | 0.977578 | 0.892377 | 0.627803 | 0.96861 |
| KJ473815.1 | 0.654709 | 0.641256 | 0.650224 | 0.941704 | 0.977578 | 0.892377 | 0.632287 | 0.996347 |
| JX993988.1 | 0.636771 | 0.650224 | 0.632287 | 0.919283 | 0.914798 | 0.887892 | 0.641256 | 0.901345 |
| DQ071615.1 | 0.64574 | 0.636771 | 0.641256 | 0.959641 | 0.950673 | 0.892377 | 0.627803 | 0.959641 |
| KT444582.1 | 0.753363 | 0.946188 | 0.766816 | 0.650224 | 0.650224 | 0.654709 | 0.946188 | 0.650224 |
| MZ206298.1 | 0.986547 | 0.730942 | 0.959641 | 0.64574 | 0.650224 | 0.636771 | 0.730942 | 0.650224 |
| KJ473814.1 | 0.650224 | 0.636771 | 0.64574 | 0.93722 | 0.977578 | 0.883408 | 0.627803 | 0.96861 |

| | MN996532.2 | KJ473811.1 | NC_014470.1 | KC881005.1 | MK211377.1 | KJ473816.1 |
|---|---|---|---|---|---|---|
| NC_045512.2 | 0.901345 | 0.641256 | 0.704036 | 0.757848 | 0.654709 | 0.632287 |
| NC_004718.3 | 0.748879 | 0.636771 | 0.726457 | 0.820628 | 0.654709 | 0.632287 |
| MT121216.1 | 0.896861 | 0.636771 | 0.713004 | 0.7713 | 0.650224 | 0.627803 |
| DQ648857.1 | 0.650224 | 0.878924 | 0.641256 | 0.641256 | 0.950673 | 0.901345 |
| GQ153542.1 | 0.650224 | 0.883408 | 0.632287 | 0.64574 | 0.928251 | 0.914798 |
| DQ648856.1 | 0.627803 | 0.941704 | 0.654709 | 0.641256 | 0.896861 | 0.910314 |
| AY278489.2 | 0.748879 | 0.627803 | 0.726457 | 0.820628 | 0.64574 | 0.627803 |
| GQ153540.1 | 0.650224 | 0.887892 | 0.636771 | 0.64574 | 0.932733 | 0.910314 |
| MN996532.2 | 1 | 0.632287 | 0.690583 | 0.757848 | 0.654709 | 0.623318 |
| KJ473811.1 | 0.632287 | 1 | 0.636771 | 0.632287 | 0.892377 | 0.90583 |
| NC_014470.1 | 0.690583 | 0.636771 | 1 | 0.753363 | 0.64574 | 0.632287 |
| KC881005.1 | 0.757848 | 0.632287 | 0.753363 | 1 | 0.650224 | 0.627803 |
| MK211377.1 | 0.654709 | 0.892377 | 0.64574 | 0.650224 | 1 | 0.919283 |
| KJ473816.1 | 0.623318 | 0.90583 | 0.632287 | 0.627803 | 0.919283 | 1 |
| MK211376.1 | 0.753363 | 0.636771 | 0.735426 | 0.852018 | 0.659193 | 0.636771 |
| AY572034.1 | 0.753363 | 0.636771 | 0.730942 | 0.834081 | 0.654709 | 0.627803 |
| KP886809.1 | 0.636771 | 0.950673 | 0.654709 | 0.650224 | 0.896861 | 0.910314 |
| MT072864.1 | 0.874439 | 0.641256 | 0.681614 | 0.757848 | 0.650224 | 0.632287 |
| KF569996.1 | 0.753363 | 0.632287 | 0.726457 | 0.834081 | 0.663677 | 0.636771 |
| JX993987.1 | 0.654709 | 0.892377 | 0.64574 | 0.64874 | 0.964126 | 0.923767 |
| MK211378.1 | 0.632287 | 0.887892 | 0.627803 | 0.627803 | 0.964126 | 0.914798 |
| MK211374.1 | 0.650224 | 0.892377 | 0.636771 | 0.64574 | 0.93722 | 0.923767 |
| KJ473815.1 | 0.654709 | 0.892377 | 0.636771 | 0.650224 | 0.941704 | 0.914798 |
| JX993988.1 | 0.632287 | 0.874439 | 0.632287 | 0.64574 | 0.93722 | 0.914798 |
| DQ071615.1 | 0.64574 | 0.892377 | 0.636771 | 0.641256 | 0.959641 | 0.914798 |
| KT444582.1 | 0.762332 | 0.636771 | 0.73991 | 0.843049 | 0.668161 | 0.641256 |
| MZ206298.1 | 0.896861 | 0.641256 | 0.699552 | 0.737848 | 0.654709 | 0.632287 |
| KJ473814.1 | 0.650224 | 0.887892 | 0.64574 | 0.64574 | 0.932735 | 0.923767 |

| | MK211376.1 | AY572034.1 | KP886809.1 | MT072864.1 | KF569996.1 | JX993987.1 | MK211378.1 | MK211374.1 |
|---|---|---|---|---|---|---|---|---|
| NC_045512.2 | 0.748879 | 0.73991 | 0.64574 | 0.860987 | 0.735426 | 0.654709 | 0.632287 | 0.650224 |
| NC_004718.3 | 0.955157 | 0.96861 | 0.641256 | 0.744395 | 0.941704 | 0.650224 | 0.632287 | 0.636771 |
| MT121216.1 | 0.762332 | 0.748879 | 0.641256 | 0.874439 | 0.748879 | 0.650224 | 0.627803 | 0.64574 |
| DQ648857.1 | 0.641256 | 0.636771 | 0.878924 | 0.654709 | 0.641256 | 0.959641 | 0.946188 | 0.93722 |
| GQ153542.1 | 0.64574 | 0.636771 | 0.878924 | 0.659193 | 0.64574 | 0.928251 | 0.932735 | 0.977578 |
| DQ648856.1 | 0.650224 | 0.641256 | 0.973094 | 0.636771 | 0.650224 | 0.892377 | 0.887892 | 0.892377 |
| AY278489.2 | 0.955157 | 0.964126 | 0.632287 | 0.748879 | 0.941704 | 0.641256 | 0.623318 | 0.627803 |
| GQ153540.1 | 0.64574 | 0.636771 | 0.887892 | 0.64574 | 0.64574 | 0.932735 | 0.93722 | 0.96861 |
| MN996532.2 | 0.753363 | 0.753363 | 0.636771 | 0.874439 | 0.753363 | 0.654709 | 0.632287 | 0.650224 |
| KJ473811.1 | 0.636771 | 0.636771 | 0.950673 | 0.641256 | 0.632287 | 0.892377 | 0.887892 | 0.892377 |
| NC_014470.1 | 0.735426 | 0.730942 | 0.654709 | 0.681614 | 0.726457 | 0.64574 | 0.627803 | 0.636771 |
| KC881005.1 | 0.852018 | 0.834081 | 0.650224 | 0.757848 | 0.834081 | 0.64574 | 0.627803 | 0.64574 |
| MK211377.1 | 0.659193 | 0.654709 | 0.896861 | 0.650224 | 0.663677 | 0.964126 | 0.964126 | 0.93722 |
| KJ473816.1 | 0.636771 | 0.627803 | 0.910314 | 0.632287 | 0.636771 | 0.923767 | 0.914798 | 0.923767 |
| MK211376.1 | 1 | 0.950673 | 0.654709 | 0.73991 | 0.973094 | 0.654709 | 0.636771 | 0.64574 |
| AY572034.1 | 0.950673 | 1 | 0.641256 | 0.744395 | 0.93722 | 0.650224 | 0.632287 | 0.636771 |
| KP886809.1 | 0.654709 | 0.641256 | 1 | 0.641256 | 0.64574 | 0.892377 | 0.887892 | 0.892377 |
| MT072864.1 | 0.73991 | 0.744395 | 0.641256 | 1 | 0.726457 | 0.654709 | 0.641256 | 0.663677 |
| KF569996.1 | 0.973094 | 0.93722 | 0.64574 | 0.726457 | 1 | 0.659193 | 0.641256 | 0.64574 |
| JX993987.1 | 0.654709 | 0.650224 | 0.892377 | 0.654709 | 0.659193 | 1 | 0.946188 | 0.93722 |
| MK211378.1 | 0.636771 | 0.632287 | 0.887892 | 0.641256 | 0.641256 | 0.946188 | 1 | 0.932735 |
| MK211374.1 | 0.64574 | 0.636771 | 0.892377 | 0.663677 | 0.64574 | 0.93722 | 0.932735 | 1 |
| KJ473815.1 | 0.650224 | 0.641256 | 0.892377 | 0.654709 | 0.650224 | 0.941704 | 0.93722 | 0.982063 |
| JX993988.1 | 0.654709 | 0.650224 | 0.887892 | 0.636771 | 0.659193 | 0.93722 | 0.93722 | 0.90583 |
| DQ071615.1 | 0.641256 | 0.636771 | 0.892377 | 0.64574 | 0.64574 | 0.959641 | 0.964126 | 0.950673 |
| KT444582.1 | 0.982063 | 0.941704 | 0.659193 | 0.744395 | 0.964126 | 0.663677 | 0.64574 | 0.650224 |
| MZ206298.1 | 0.744395 | 0.73991 | 0.64574 | 0.860987 | 0.730942 | 0.654709 | 0.632287 | 0.650224 |
| KJ473814.1 | 0.64574 | 0.636771 | 0.887892 | 0.663677 | 0.641256 | 0.932735 | 0.928251 | 0.977578 |

| | KJ473815.1 | JX993988.1 | DQ071615.1 | KT444582.1 | MZ206298.1 | KJ473814.1 |
|---|---|---|---|---|---|---|
| NC_045512.2 | 0.654709 | 0.636771 | 0.64574 | 0.753363 | 0.986547 | 0.650224 |
| NC_004718.3 | 0.641256 | 0.650224 | 0.636771 | 0.946188 | 0.730942 | 0.636771 |
| MT121216.1 | 0.650224 | 0.632287 | 0.641256 | 0.766816 | 0.959641 | 0.64574 |
| DQ648857.1 | 0.941704 | 0.919283 | 0.959641 | 0.650224 | 0.64574 | 0.93722 |
| GQ153542.1 | 0.977578 | 0.914798 | 0.950673 | 0.650224 | 0.650224 | 0.977578 |
| DQ648856.1 | 0.892377 | 0.887892 | 0.892377 | 0.654709 | 0.636771 | 0.883408 |
| AY278489.2 | 0.632287 | 0.641256 | 0.627803 | 0.946188 | 0.730942 | 0.627803 |
| GQ153540.1 | 0.986547 | 0.901345 | 0.959641 | 0.650224 | 0.650224 | 0.96861 |
| MN996532.2 | 0.654709 | 0.632287 | 0.64574 | 0.762332 | 0.896861 | 0.650224 |
| KJ473811.1 | 0.892377 | 0.874439 | 0.892377 | 0.636771 | 0.641256 | 0.887892 |
| NC_014470.1 | 0.636771 | 0.632287 | 0.636771 | 0.73991 | 0.699552 | 0.64574 |
| KC881005.1 | 0.650224 | 0.64574 | 0.641256 | 0.843049 | 0.757848 | 0.64574 |
| MK211377.1 | 0.941704 | 0.93722 | 0.959641 | 0.668161 | 0.654709 | 0.932735 |
| KJ473816.1 | 0.914798 | 0.914798 | 0.914798 | 0.641256 | 0.632287 | 0.923767 |
| MK211376.1 | 0.650224 | 0.654709 | 0.641256 | 0.982063 | 0.744395 | 0.64574 |
| AY572034.1 | 0.641256 | 0.650224 | 0.636771 | 0.941704 | 0.73991 | 0.636771 |
| KP886809.1 | 0.892377 | 0.887892 | 0.892377 | 0.659193 | 0.64574 | 0.887892 |
| MT072864.1 | 0.654709 | 0.636771 | 0.64574 | 0.744395 | 0.860987 | 0.663677 |
| KF569996.1 | 0.650224 | 0.659193 | 0.64574 | 0.964126 | 0.730942 | 0.641256 |
| JX993987.1 | 0.941704 | 0.93722 | 0.959641 | 0.663677 | 0.654709 | 0.932735 |
| MK211378.1 | 0.93722 | 0.93722 | 0.964126 | 0.64574 | 0.632287 | 0.928251 |
| MK211374.1 | 0.982063 | 0.90583 | 0.950673 | 0.650224 | 0.650224 | 0.977578 |
| KJ473815.1 | 1 | 0.901345 | 0.964126 | 0.654709 | 0.654709 | 0.973094 |
| JX993988.1 | 0.901345 | 1 | 0.932735 | 0.663677 | 0.636771 | 0.910314 |
| DQ071615.1 | 0.964126 | 0.932735 | 1 | 0.650224 | 0.64574 | 0.941704 |
| KT444582.1 | 0.654709 | 0.663677 | 0.650224 | 1 | 0.748879 | 0.650224 |
| MZ206298.1 | 0.654709 | 0.636771 | 0.64574 | 0.748879 | 1 | 0.650224 |
| KJ473814.1 | 0.973094 | 0.910314 | 0.941704 | 0.650224 | 0.650224 | 1 |

TABLE 14B
Percent Identity of RBDΔRBM Domains

| | NC_045512.2 | NC_004718.3 | MT121216.1 | DQ648857.1 | GQ153542.1 | DQ648856.1 | AY278489.2 | GQ153540.1 |
|---|---|---|---|---|---|---|---|---|
| NC_045512.2 | 1 | 0.842105 | 0.960526 | 0.802632 | 0.802632 | 0.809211 | 0.842105 | 0.802632 |
| NC_004718.3 | 0.842105 | 1 | 0.855263 | 0.789474 | 0.789474 | 0.802632 | 0.980263 | 0.789474 |
| MT121216.1 | 0.960526 | 0.85$263 | 1 | 0.796053 | 0.796033 | 0.802632 | 0.855263 | 0.796053 |
| DQ648857.1 | 0.802632 | 0.789474 | 0.796053 | 1 | 0.967105 | 0.927632 | 0.776316 | 0.973684 |
| GQ153542.1 | 0.802632 | 0.789474 | 0.796053 | 0.967105 | 1 | 0.921053 | 0.776316 | 0.967105 |
| DQ648856.1 | 0.809211 | 0.802632 | 0.802632 | 0.927632 | 0.921053 | 1 | 0.789474 | 0.934211 |
| AY278489.2 | 0.842105 | 0.980263 | 0.855263 | 0.776316 | 0.776316 | 0.789474 | 1 | 0.776316 |
| GQ153540.1 | 0.802632 | 0.789474 | 0.796053 | 0.973684 | 0.967105 | 0.934211 | 0.776316 | 1 |
| MN996532.2 | 0.967105 | 0.855263 | 0.960526 | 0.802632 | 0.802632 | 0.809211 | 0.855263 | 0.802632 |
| KJ473811.1 | 0.802632 | 0.796053 | 0.796053 | 0.914474 | 0.907895 | 0.947368 | 0.782895 | 0.921053 |
| NC_014470.1 | 0.835526 | 0.842105 | 0.848684 | 0.789474 | 0.782895 | 0.802632 | 0.842105 | 0.789474 |
| KC881005.1 | 0.855263 | 0.953947 | 0.875 | 0.796053 | 0.796053 | 0.809211 | 0.953947 | 0.796053 |
| MK211377.1 | 0.815789 | 0.802632 | 0.809211 | 0.973684 | 0.967105 | 0.947368 | 0.789474 | 0.980263 |
| KJ473816.1 | 0.789474 | 0.782895 | 0.782895 | 0.940789 | 0.940789 | 0.921053 | 0.776316 | 0.940789 |
| MK211376.1 | 0.855263 | 0.960526 | 0.875 | 0.796053 | 0.796053 | 0.809211 | 0.960526 | 0.796053 |
| AY572034.1 | 0.855263 | 0.986842 | 0.868421 | 0.789474 | 0.789474 | 0.802632 | 0.980263 | 0.789474 |
| KP886809.1 | 0.809211 | 0.802632 | 0.802632 | 0.927632 | 0.914474 | 0.993421 | 0.789474 | 0.927632 |
| MT072864.1 | 0.914474 | 0.861842 | 0.927632 | 0.796053 | 0.796053 | 0.789474 | 0.868421 | 0.782895 |
| KF569996.1 | 0.842105 | 0.947368 | 0.861842 | 0.789474 | 0.796053 | 0.809211 | 0.947368 | 0.796053 |
| JX993987.1 | 0.815789 | 0.802632 | 0.809211 | 0.973684 | 0.967105 | 0.947368 | 0.789474 | 0.980263 |
| MK211378.1 | 0.796053 | 0.782895 | 0.789474 | 0.973684 | 0.967105 | 0.907632 | 0.769737 | 0.980263 |
| MK211374.1 | 0.809211 | 0.796053 | 0.802632 | 0.980263 | 0.973684 | 0.934211 | 0.782895 | 0.967105 |
| KJ473815.1 | 0.809211 | 0.796053 | 0.802632 | 0.986842 | 0.967105 | 0.940789 | 0.782895 | 0.986842 |
| JX993988.1 | 0.789474 | 0.802632 | 0.782895 | 0.927632 | 0.947368 | 0.927632 | 0.789474 | 0.934211 |
| DQ071615.1 | 0.802632 | 0.789474 | 0.796053 | 0.980263 | 0.973684 | 0.934211 | 0.776316 | 0.993421 |
| KT444582.1 | 0.861842 | 0.953947 | 0.881579 | 0.802632 | 0.802632 | 0.815789 | 0.953947 | 0.802632 |
| MZ206298.1 | 0.993421 | 0.842105 | 0.960526 | 0.802632 | 0.802632 | 0.809211 | 0.842105 | 0.802632 |
| KJ473814.1 | 0.809211 | 0.796053 | 0.802632 | 0.980263 | 0.973684 | 0.927632 | 0.782895 | 0.967105 |

| | MN996532.2 | KJ473811.1 | NC_014470.1 | KC881005.1 | MK211377.1 | KJ473816.1 |
|---|---|---|---|---|---|---|
| NC_045512.2 | 0.967105 | 0.802632 | 0.835526 | 0.855263 | 0.815789 | 0.789474 |
| NC_004718.3 | 0.855263 | 0.796053 | 0.842105 | 0.953947 | 0.802632 | 0.782895 |
| MT121216.1 | 0.960526 | 0.796053 | 0.848684 | 0.875 | 0.809211 | 0.782895 |
| DQ648857.1 | 0.802632 | 0.914474 | 0.789474 | 0.796053 | 0.973684 | 0.940759 |
| GQ153542.1 | 0.802632 | 0.907895 | 0.782895 | 0.796053 | 0.967105 | 0.940789 |
| DQ648356.1 | 0.809211 | 0.947368 | 0.802632 | 0.809211 | 0.947368 | 0.921053 |
| AY278489.2 | 0.855263 | 0.782895 | 0.842105 | 0.953947 | 0.759474 | 0.776316 |
| GQ153540.1 | 0.802632 | 0.921053 | 0.789474 | 0.796053 | 0.980263 | 0.940789 |
| MN996532.2 | 1 | 0.802632 | 0.842105 | 0.875 | 0.815789 | 0.789474 |
| KJ473811.1 | 0.802632 | 1 | 0.776316 | 0.789474 | 0.927632 | 0.901316 |
| NC_014470.1 | 0.842105 | 0.776316 | 1 | 0.861842 | 0.796053 | 0.776316 |
| KC881005.1 | 0.875 | 0.789474 | 0.861842 | 1 | 0.809211 | 0.782895 |
| MK211377.1 | 0.815739 | 0.927632 | 0.796053 | 0.809211 | 1 | 0.947368 |
| KJ473816.1 | 0.789474 | 0.901316 | 0.776316 | 0.782895 | 0.947368 | 1 |
| MK211376.1 | 0.875 | 0.789474 | 0.861842 | 0.993421 | 0.809211 | 0.782895 |
| AY572034.1 | 0.868421 | 0.796053 | 0.855263 | 0.967105 | 0.802632 | 0.776316 |
| KP886809.1 | 0.809211 | 0.947368 | 0.802632 | 0.815789 | 0.940789 | 0.914474 |
| MT072864.1 | 0.927632 | 0.782895 | 0.835526 | 0.868421 | 0.796053 | 0.782895 |
| KF569996.1 | 0.861842 | 0.782895 | 0.848684 | 0.973684 | 0.809211 | 0.782895 |
| JX993987.1 | 0.815789 | 0.927632 | 0.796053 | 0.809211 | 0.993421 | 0.947368 |
| MK211378.1 | 0.796053 | 0.914474 | 0.776316 | 0.789474 | 0.973684 | 0.940759 |
| MK211374.1 | 0.809211 | 0.914474 | 0.789474 | 0.802632 | 0.980263 | 0.947368 |
| KJ473815.1 | 0.809211 | 0.921053 | 0.789474 | 0.802632 | 0.986842 | 0.940789 |
| JX993988.1 | 0.789474 | 0.894737 | 0.776316 | 0.809211 | 0.934211 | 0.927632 |
| DQ071615.1 | 0.802632 | 0.921053 | 0.782893 | 0.796053 | 0.980263 | 0.934211 |
| KT444582.1 | 0.881579 | 0.789474 | 0.868423 | 0.993421 | 0.815789 | 0.789474 |
| MZ206298.1 | 0.960526 | 0.802632 | 0.835526 | 0.855263 | 0.815789 | 0.789474 |
| KJ473814.1 | 0.809211 | 0.914474 | 0.802632 | 0.802632 | 0.973684 | 0.953947 |

| | MK211376.1 | AY572034.1 | KP886809.1 | MT072864.1 | KF569996.1 | JX993987.1 | MK211378.1 | MK211374.1 |
|---|---|---|---|---|---|---|---|---|
| NC_045512.2 | 0.833263 | 0.855263 | 0.809211 | 0.914474 | 0.842105 | 0.813789 | 0.796033 | 0.809211 |
| NC_004718.3 | 0.960526 | 0.986842 | 0.802632 | 0.861842 | 0.947368 | 0.802632 | 0.782895 | 0.796053 |
| MT121216.1 | 0.875 | 0.868421 | 0.802632 | 0.927632 | 0.861842 | 0.809211 | 0.789474 | 0.802632 |
| DQ648857.1 | 0.796053 | 0.789474 | 0.927632 | 0.796053 | 0.789474 | 0.973684 | 0.973684 | 0.980263 |
| GQ153542.1 | 0.796053 | 0.789474 | 0.914474 | 0.796053 | 0.796033 | 0.967105 | 0.967105 | 0.973684 |
| DQ648856.1 | 0.809211 | 0.802632 | 0.993421 | 0.789474 | 0.809211 | 0.947368 | 0.927632 | 0.934211 |
| AY278489.2 | 0.960526 | 0.980263 | 0.789474 | 0.868421 | 0.947368 | 0.789474 | 0.769737 | 0.782893 |
| GQ133340.1 | 0.796053 | 0.789474 | 0.927632 | 0.782895 | 0.796053 | 0.980263 | 0.980263 | 0.967103 |
| MN996532.2 | 0.875 | 0.868421 | 0.809211 | 0.927632 | 0.861842 | 0.815789 | 0.796053 | 0.809211 |
| KJ473811.1 | 0.789474 | 0.796033 | 0.947368 | 0.782895 | 0.782895 | 0.927632 | 0.914474 | 0.914474 |
| NC_014470.1 | 0.861842 | 0.833263 | 0.802632 | 0.835526 | 0.848684 | 0.796053 | 0.776316 | 0.789474 |
| KC881005.1 | 0.993421 | 0.967105 | 0.815789 | 0.868421 | 0.973684 | 0.809211 | 0.789474 | 0.802632 |
| MK211377.1 | 0.809211 | 0.802632 | 0.940789 | 0.796053 | 0.809211 | 0.993421 | 0.973684 | 0.980263 |
| KJ473816.1 | 0.782895 | 0.776316 | 0.914474 | 0.782895 | 0.782895 | 0.947368 | 0.940789 | 0.947368 |
| MK211376.1 | 1 | 0.973684 | 0.815789 | 0.866421 | 0.980263 | 0.809211 | 0.789474 | 0.802632 |
| AY572034.1 | 0.973684 | 1 | 0.802632 | 0.875 | 0.960526 | 0.802632 | 0.782895 | 0.796053 |
| KP886809.1 | 0.815789 | 0.802632 | 1 | 0.789474 | 0.802632 | 0.940789 | 0.921053 | 0.927632 |
| MT072864.1 | 0.868421 | 0.875 | 0.789474 | 1 | 0.856263 | 0.802632 | 0.789474 | 0.802632 |
| KF569996.1 | 0.980263 | 0.960526 | 0.802632 | 0.855263 | 1 | 0.809211 | 0.789474 | 0.802632 |
| JX993987.1 | 0.809211 | 0.802632 | 0.940789 | 0.802632 | 0.809211 | 1 | 0.967105 | 0.980263 |
| MK211378.1 | 0.789474 | 0.782895 | 0.921053 | 0.789474 | 0.789474 | 0.967105 | 1 | 0.967105 |
| MK211374.1 | 0.802632 | 0.796053 | 0.927632 | 0.802632 | 0.802632 | 0.980263 | 0.967105 | 1 |
| KJ473815.1 | 0.802632 | 0.796053 | 0.934211 | 0.789474 | 0.802632 | 0.986842 | 0.973684 | 0.980263 |
| JX993988.1 | 0.809211 | 0.802632 | 0.921053 | 0.782893 | 0.809211 | 0.934211 | 0.940789 | 0.934211 |
| DQ071615.1 | 0.796053 | 0.789474 | 0.927632 | 0.782895 | 0.796053 | 0.980263 | 0.980263 | 0.973684 |
| KT444582.1 | 0.993421 | 0.967105 | 0.822368 | 0.375 | 0.973684 | 0.815789 | 0.796053 | 0.809211 |
| MZ206298.1 | 0.855063 | 0.833263 | 0.809211 | 0.914474 | 0.842105 | 0.815789 | 0.796053 | 0.809211 |
| KJ473814.1 | 0.802632 | 0.796053 | 0.927632 | 0.802632 | 0.796053 | 0.973684 | 0.960526 | 0.973684 |

| | KJ473815.1 | JX993988.1 | DQ071615.1 | KT444582.1 | MZ206298.1 | KJ473814.1 |
|---|---|---|---|---|---|---|
| NC_045512.2 | 0.809211 | 0.789474 | 0.802632 | 0.861842 | 0.993421 | 0.809211 |
| NC_004718.3 | 0.796053 | 0.802632 | 0.789474 | 0.953947 | 0.842103 | 0.796053 |
| MT121216.1 | 0.802632 | 0.782895 | 0.796053 | 0.881579 | 0.960526 | 0.802632 |
| DQ648857.1 | 0.986842 | 0.927632 | 0.980263 | 0.802632 | 0.802632 | 0.980263 |
| GQ153542.1 | 0.967105 | 0.947368 | 0.973684 | 0.802632 | 0.802632 | 0.973684 |
| DQ648856.1 | 0.940789 | 0.927632 | 0.934211 | 0.815789 | 0.809211 | 0.927632 |
| AY278489.2 | 0.782895 | 0.789474 | 0.776316 | 0.953947 | 0.842105 | 0.782895 |
| GQ153540.1 | 0.986842 | 0.934211 | 0.993421 | 0.802632 | 0.802632 | 0.967105 |
| MN996532.2 | 0.809211 | 0.789474 | 0.802632 | 0.881579 | 0.960526 | 0.809211 |
| KJ473811.1 | 0.921053 | 0.894737 | 0.921053 | 0.789474 | 0.802632 | 0.914474 |
| NC_014470.1 | 0.789474 | 0.776316 | 0.782895 | 0.868421 | 0.835526 | 0.802632 |
| KC881005.1 | 0.802632 | 0.809211 | 0.796053 | 0.993421 | 0.855263 | 0.802632 |
| MK211377.1 | 0.986842 | 0.934211 | 0.980263 | 0.815789 | 0.815789 | 0.973684 |
| KJ473816.1 | 0.940789 | 0.927632 | 0.934211 | 0.789474 | 0.789474 | 0.953947 |
| MK211376.1 | 0.802632 | 0.809211 | 0.796053 | 0.993421 | 0.855263 | 0.802632 |
| AY572034.1 | 0.796053 | 0.802632 | 0.789474 | 0.967105 | 0.855263 | 0.796063 |
| KP886809.1 | 0.934211 | 0.921053 | 0.927632 | 0.822368 | 0.809211 | 0.927632 |
| MT072864.1 | 0.789474 | 0.782895 | 0.782895 | 0.875 | 0.914474 | 0.802632 |
| KF569996.1 | 0.802632 | 0.809211 | 0.796053 | 0.973684 | 0.842105 | 0.796053 |
| JX993987.1 | 0.986842 | 0.934211 | 0.980263 | 0.815789 | 0.815789 | 0.973684 |
| MK211378.1 | 0.973684 | 0.940789 | 0.980263 | 0.796053 | 0.796053 | 0.960326 |
| MK211374.1 | 0.980263 | 0.934211 | 0.973684 | 0.809211 | 0.809211 | 0.973684 |
| KJ473815.1 | 1 | 0.927632 | 0.993421 | 0.809211 | 0.809211 | 0.967105 |
| JX993988.1 | 0.927632 | 1 | 0.934211 | 0.815789 | 0.789474 | 0.940789 |
| DQ071615.1 | 0.993421 | 0.934211 | 1 | 0.802632 | 0.802632 | 0.960526 |
| KT444582.1 | 0.809211 | 0.815789 | 0.802632 | 1 | 0.861842 | 0.809211 |
| MZ206298.1 | 0.809211 | 0.789474 | 0.802632 | 0.861842 | 1 | 0.809211 |
| KJ473814.1 | 0.967105 | 0.940789 | 0.960526 | 0.809211 | 0.809211 | 1 |

TABLE 14C
Percent Identity of RBM Domains

| | NC_045512.2 | NC_004718.3 | MT121216.1 | DQ648857.1 | GQ153542.1 | DQ648856.1 | AY278489.2 |
|---|---|---|---|---|---|---|---|
| NC_045512.2 | 1 | 0.492958 | 0.985915 | 0.309859 | 0.323944 | 0.267606 | 0.492958 |
| NC_004718.3 | 0.492958 | 1 | 0.492958 | 0.309859 | 0.309859 | 0.295775 | 1 |
| MT121216.1 | 0.985915 | 0.492958 | 1 | 0.309859 | 0.323944 | 0.267606 | 0.492958 |
| DQ648857.1 | 0.309859 | 0.309859 | 0.309839 | 1 | 0.84507 | 0.760563 | 0.309859 |
| GQ153542.1 | 0.323944 | 0.309859 | 0.323944 | 0.84507 | 1 | 0.788732 | 0.309859 |
| DQ648856.1 | 0.267606 | 0.295775 | 0.267606 | 0.760563 | 0.788732 | 1 | 0.295775 |
| AY278489.2 | 0.492938 | 1 | 0.492958 | 0.309859 | 0.309859 | 0.295775 | 1 |
| GQ153540.1 | 0.323944 | 0.309859 | 0.323944 | 0.830986 | 0.985915 | 0.774648 | 0.309859 |
| MN996532.2 | 0.760563 | 0.521127 | 0.760563 | 0.323944 | 0.323944 | 0.239437 | 0.521127 |
| KJ473811.1 | 0.295775 | 0.295775 | 0.295775 | 0.802817 | 0.830986 | 0.929577 | 0.295775 |
| NC_014470.1 | 0.422535 | 0.478873 | 0.422535 | 0.323944 | 0.309859 | 0.338028 | 0.478873 |
| KC881005.1 | 0.549296 | 0.535211 | 0.549296 | 0.309859 | 0.323944 | 0.28169 | 0.535211 |
| MK211377.1 | 0.309859 | 0.338028 | 0.309859 | 0.901408 | 0.84507 | 0.788732 | 0.338028 |
| KJ473816.1 | 0.295775 | 0.309859 | 0.295775 | 0.816901 | 0.839155 | 0.887324 | 0.309859 |
| MK211376.1 | 0.521127 | 0.943662 | 0.521127 | 0.309859 | 0.323944 | 0.309859 | 0.943662 |
| AY572034.1 | 0.492958 | 0.929577 | 0.492958 | 0.309859 | 0.309859 | 0.295775 | 0.929577 |
| KP886809.1 | 0.295775 | 0.295775 | 0.295775 | 0.774648 | 0.802817 | 0.929577 | 0.295775 |
| MT072864.1 | 0.746479 | 0.492958 | 0.760563 | 0.352113 | 0.366197 | 0.309859 | 0.492958 |
| KF569996.1 | 0.507042 | 0.929577 | 0.507042 | 0.323944 | 0.323944 | 0.309859 | 0.929577 |
| JX993987.1 | 0.309859 | 0.323944 | 0.309859 | 0.929577 | 0.84507 | 0.774648 | 0.323944 |
| MK211378.1 | 0.28169 | 0.309859 | 0.28169 | 0.887324 | 0.859155 | 0.802817 | 0.309859 |
| MK211374.1 | 0.309859 | 0.295775 | 0.309859 | 0.84507 | 0.985915 | 0.802817 | 0.295775 |
| KJ473815.1 | 0.323944 | 0.309859 | 0.323944 | 0.84507 | 1 | 0.788732 | 0.309859 |
| JX993988.1 | 0.309859 | 0.323944 | 0.309859 | 0.901408 | 0.84507 | 0.802817 | 0.323944 |
| DQ071615.1 | 0.309859 | 0.309859 | 0.309859 | 0.915493 | 0.901408 | 0.802817 | 0.309859 |
| KT444582.1 | 0.521127 | 0.929577 | 0.521127 | 0.323944 | 0.323944 | 0.309859 | 0.929577 |
| MZ206298.1 | 0.971831 | 0.492958 | 0.957746 | 0.309859 | 0.323944 | 0.267606 | 0.492958 |
| KJ473814.1 | 0.309859 | 0.295775 | 0.309859 | 0.84507 | 0.985915 | 0.788732 | 0.295775 |

| | GQ153540.1 | MN996532.2 | KJ473811.1 | NC_014470.1 | KC881005.1 | MK211377.1 | KJ473816.1 |
|---|---|---|---|---|---|---|---|
| NC_045512.2 | 0.323944 | 0.760563 | 0.295775 | 0.422535 | 0.549296 | 0.309859 | 0.295775 |
| NC_004718.3 | 0.309859 | 0.521127 | 0.295775 | 0.478873 | 0.535211 | 0.338028 | 0.309859 |
| MT121216.1 | 0.3239444 | 0.760563 | 0.295775 | 0.422535 | 0.549296 | 0.309859 | 0.295775 |
| DQ648857.1 | 0.830986 | 0.323944 | 0.802817 | 0.323944 | 0.309859 | 0.901408 | 0.816901 |
| GQ153542.1 | 0.985915 | 0.323944 | 0.830986 | 0.309859 | 0.323944 | 0.84507 | 0.859155 |
| DQ648856.1 | 0.774648 | 0.239437 | 0.929577 | 0.338028 | 0.28169 | 0.788732 | 0.887324 |
| AY278489.2 | 0.309859 | 0.521127 | 0.295775 | 0.478873 | 0.535211 | 0.338028 | 0.309859 |
| GQ153540.1 | 1 | 0.323944 | 0.816901 | 0.309859 | 0.323944 | 0.830986 | 0.84507 |
| MN996532.2 | 0.323944 | 1 | 0.267606 | 0.366197 | 0.507042 | 0.309859 | 0.267606 |
| KJ473811.1 | 0.816901 | 0.267606 | 1 | 0.338028 | 0.295775 | 0.816901 | 0.915493 |
| NC_014470.1 | 0.309859 | 0.366197 | 0.338028 | 1 | 0.521127 | 0.323944 | 0.323944 |
| KC881005.1 | 0.323944 | 0.307042 | 0.295775 | 0.521127 | 1 | 0.309859 | 0.295775 |
| MK211377.1 | 0.830986 | 0.309859 | 0.816901 | 0.323944 | 0.309859 | 1 | 0.859155 |
| KJ473816.1 | 0.84507 | 0.267606 | 0.915493 | 0.323944 | 0.295775 | 0.859155 | 1 |
| MK211376.1 | 0.323944 | 0.492958 | 0.309859 | 0.464789 | 0.549296 | 0.338028 | 0.323944 |
| AY572034.1 | 0.309859 | 0.507042 | 0.295775 | 0.464789 | 0.549296 | 0.338028 | 0.309859 |
| KP886809.1 | 0.802817 | 0.267606 | 0.937746 | 0.338028 | 0.295775 | 0.802817 | 0.901408 |
| MT072864.1 | 0.352113 | 0.760563 | 0.338028 | 0.352113 | 0.521127 | 0.338028 | 0.309859 |
| KF569996.1 | 0.323944 | 0.521127 | 0.309859 | 0.464789 | 0.535211 | 0.352113 | 0.323944 |
| JX993987.1 | 0.830986 | 0.309859 | 0.816901 | 0.323944 | 0.295775 | 0.901408 | 0.873239 |
| MK211378.1 | 0.84507 | 0.28169 | 0.830986 | 0.309859 | 0.28169 | 0.943662 | 0.859155 |
| MK211374.1 | 0.971831 | 0.309859 | 0.84507 | 0.309859 | 0.309859 | 0.84507 | 0.873239 |
| KJ473815.1 | 0.985915 | 0.323944 | 0.830986 | 0.309859 | 0.323944 | 0.84507 | 0.859155 |
| JX993988.1 | 0.830986 | 0.295775 | 0.830986 | 0.323944 | 0.295775 | 0.943662 | 0.887324 |
| DQ071615.1 | 0.887324 | 0.309859 | 0.830986 | 0.323944 | 0.309859 | 0.915493 | 0.873239 |
| KT444582.1 | 0.323944 | 0.507042 | 0.309859 | 0.464789 | 0.521127 | 0.352113 | 0.323944 |
| MZ206298.1 | 0.323944 | 0.760563 | 0.295775 | 0.408451 | 0.549296 | 0.309859 | 0.295775 |
| KJ473814.1 | 0.971831 | 0.309859 | 0.830986 | 0.309859 | 0.309859 | 0.84507 | 0.859155 |

| | MK211376.1 | AY572034.1 | KP886809.1 | MT072864.1 | KF569996.1 | JX993987.1 | MK211378.1 |
|---|---|---|---|---|---|---|---|
| NC_045512.2 | 0.521127 | 0.492958 | 0.295775 | 0.746479 | 0.507042 | 0.309859 | 0.28169 |
| NC_004718.3 | 0.943662 | 0.929377 | 0.295775 | 0.492958 | 0.929577 | 0.323944 | 0.309859 |
| MT121216.1 | 0.521127 | 0.492958 | 0.295775 | 0.760563 | 0.507042 | 0.309859 | 0.28169 |
| DQ648857.1 | 0.309859 | 0.309859 | 0.774648 | 0.352113 | 0.323944 | 0.929577 | 0.887324 |
| GQ153542.1 | 0.323944 | 0.309S39 | 0.802817 | 0.366197 | 0.323944 | 0.84507 | 0.859155 |
| DQ648856.1 | 0.309859 | 0.295775 | 0.929577 | 0.309859 | 0.309839 | 0.774648 | 0.802817 |
| AY278489.2 | 0.943662 | 0.929577 | 0.295775 | 0.492958 | 0.929577 | 0.323944 | 0.309859 |
| GQ153540.1 | 0.323944 | 0.309859 | 0.802817 | 0.352113 | 0.323944 | 0.830986 | 0.84507 |
| MN996532.2 | 0.492958 | 0.507042 | 0.267606 | 0.760563 | 0.521127 | 0.309859 | 0.28169 |
| KJ473811.1 | 0.309859 | 0.295775 | 0.957746 | 0.338028 | 0.309859 | 0.816901 | 0.830986 |
| NC_014470.1 | 0.464789 | 0.464789 | 0.338028 | 0.352113 | 0.464789 | 0.323944 | 0.309859 |
| KC881005.1 | 0.349296 | 0.549296 | 0.295775 | 0.521127 | 0.535211 | 0.295775 | 0.28169 |
| MK211377.1 | 0.338028 | 0.338028 | 0.802817 | 0.338028 | 0.352113 | 0.901408 | 0.943662 |
| KJ473816.1 | 0.323944 | 0.309859 | 0.901408 | 0.309859 | 0.323944 | 0.873239 | 0.859155 |
| MK211376.1 | 1 | 0.901408 | 0.309859 | 0.464789 | 0.957746 | 0.323944 | 0.309859 |
| AY572034.1 | 0.901408 | 1 | 0.295775 | 0.464789 | 0.887324 | 0.323944 | 0.309859 |
| KP886809.1 | 0.309859 | 0.295775 | 1 | 0.323944 | 0.309859 | 0.788732 | 0.816901 |
| MT072864.1 | 0.464789 | 0.464789 | 0.323944 | 1 | 0.450704 | 0.338028 | 0.323944 |
| KF569996.1 | 0.957746 | 0.887324 | 0.309859 | 0.450704 | 1 | 0.338028 | 0.323944 |
| JX993987.1 | 0.323944 | 0.323944 | 0.788732 | 0.338028 | 0.338028 | 1 | 0.901408 |
| MK211378.1 | 0.309859 | 0.309859 | 0.816901 | 0.323944 | 0.323944 | 0.901408 | 1 |
| MK211374.1 | 0.309839 | 0.295775 | 0.816901 | 0.366197 | 0.309859 | 0.84507 | 0.859155 |
| KJ473815.1 | 0.323944 | 0.309859 | 0.802817 | 0.366197 | 0.323944 | 0.84507 | 0.859155 |
| JX993988.1 | 0.323944 | 0.323944 | 0.816901 | 0.323944 | 0.338028 | 0.943662 | 0.929577 |
| DQ071615.1 | 0.309839 | 0.309859 | 0.816901 | 0.332113 | 0.323944 | 0.915493 | 0.929577 |
| KT444582.1 | 0.957746 | 0.887324 | 0.309859 | 0.464789 | 0.943662 | 0.338028 | 0.323944 |
| MZ206298.1 | 0.507042 | 0.492958 | 0.295775 | 0.746479 | 0.492958 | 0.309859 | 0.28169 |
| KJ473814.1 | 0.309859 | 0.295775 | 0.802817 | 0.366197 | 0.309859 | 0.84507 | 0.859155 |

| | MK211374.1 | KJ473815.1 | JX993988.1 | DQ071615.1 | KT444582.1 | MZ206298.1 | KJ473814.1 |
|---|---|---|---|---|---|---|---|
| NC_045512.2 | 0.309859 | 0.323944 | 0.309859 | 0.309859 | 0.521127 | 0.971831 | 0.309859 |
| NC_004718.3 | 0.295775 | 0.309859 | 0.323944 | 0.309859 | 0.929577 | 0.492958 | 0.295775 |
| MT121216.1 | 0.309859 | 0.323944 | 0.309859 | 0.309859 | 0.521127 | 0.957746 | 0.309859 |
| DQ648857.1 | 0.84507 | 0.84507 | 0.901408 | 0.915493 | 0.323944 | 0.309859 | 0.84507 |
| GQ153542.1 | 0.985915 | 1 | 0.84507 | 0.901408 | 0.323944 | 0.323944 | 0.985915 |
| DQ648856.1 | 0.802817 | 0.788732 | 0.802817 | 0.802817 | 0.309839 | 0.267606 | 0.788732 |
| AY278489.2 | 0.295775 | 0.309859 | 0.323944 | 0.309859 | 0.929577 | 0.492958 | 0.295775 |
| GQ153540.1 | 0.971831 | 0.985915 | 0.830986 | 0.887324 | 0.323944 | 0.323944 | 0.971831 |
| MN996532.2 | 0.309859 | 0.323944 | 0.295775 | 0.309859 | 0.507042 | 0.760563 | 0.309859 |
| KJ473811.1 | 0.84507 | 0.830986 | 0.830986 | 0.830986 | 0.309859 | 0.295775 | 0.830986 |
| NC_014470.1 | 0.309859 | 0.309859 | 0.323944 | 0.323944 | 0.464789 | 0.408451 | 0.309859 |
| KC881005.1 | 0.309859 | 0.323944 | 0.295775 | 0.309859 | 0.521127 | 0.549296 | 0.309859 |
| MK211377.1 | 0.84507 | 0.84507 | 0.943662 | 0.915493 | 0.352113 | 0.309859 | 0.84507 |
| KJ473816.1 | 0.873239 | 0.859155 | 0.887324 | 0.873239 | 0.323944 | 0.295775 | 0.859155 |
| MK211376.1 | 0.309859 | 0.323944 | 0.323944 | 0.309859 | 0.957746 | 0.507042 | 0.309859 |
| AY572034.1 | 0.295775 | 0.309859 | 0.323944 | 0.309859 | 0.887324 | 0.492958 | 0.295775 |
| KP886809.1 | 0.816901 | 0.802817 | 0.816901 | 0.816901 | 0.309859 | 0.295775 | 0.802817 |
| MT072864.1 | 0.366197 | 0.366197 | 0.323944 | 0.352113 | 0.464789 | 0.746479 | 0.366197 |
| KF569996.1 | 0.309859 | 0.323944 | 0.338028 | 0.323944 | 0.943662 | 0.492958 | 0.309859 |
| JX993987.1 | 0.84507 | 0.84507 | 0.943662 | 0.915493 | 0.338028 | 0.309859 | 0.84507 |
| MK211378.1 | 0.859155 | 0.839155 | 0.929577 | 0.929577 | 0.323944 | 0.28169 | 0.859155 |
| MK211374.1 | 1 | 0.985915 | 0.84507 | 0.901408 | 0.309859 | 0.309859 | 0.985913 |
| KJ473815.1 | 0.985915 | 1 | 0.84507 | 0.901408 | 0.323944 | 0.323944 | 0.988913 |
| JX993988.1 | 0.84507 | 0.84507 | 1 | 0.929577 | 0.338028 | 0.309859 | 0.84507 |
| DQ071615.1 | 0.901408 | 0.901408 | 0.929577 | 1 | 0.323944 | 0.309859 | 0.901408 |
| KT444582.1 | 0.309859 | 0.323944 | 0.338028 | 0.323944 | 1 | 0.507042 | 0.309859 |
| MZ206298.1 | 0.309859 | 0.323944 | 0.309859 | 0.309859 | 0.507042 | 1 | 0.309859 |
| KJ473814.1 | 0.985913 | 0.985915 | 0.84507 | 0.901408 | 0.309859 | 0.309859 | 1 |

### TCE Cassette Design

[0633] Four unique T-cell epitope (TCE) cassette candidates were generated that contained conserved CD8+ T-cell epitopes derived from multiple SARS-COV-2 proteins other than Spike. The selected epitopes were 100% conserved across 75 Sarbecovirus strains and were sourced from either validated epitopes [Saini et al, 2021 (Sci Immunol. 2021 Apr. 14; 6(58): eabf7550); Tarke et al, 2021 (Cell Rep Med. 2021 Feb. 16; 2(2):100204.)] or predicted using Gritstone's EDGE™ epitope prediction platform [Bulik-Sullivan et al, 2018 (Nat Biotechnol. 2018 Dec. 17)] further modified to predict viral epitopes. The validated T-cell epitopes made up a 271 AA cassette sequence. To maximize the coverage of the vaccine across populations, the T-cell cassette design aimed to have most (>95%) individuals across 4 major ancestry groups (European, Asian, Hispanic and African descent) receive at least 1 validated CD8+ T-cell epitope or 8 predicted epitopes within a desired cassette sequence footprint size. The epitope frames in the resulting candidate antigen cassettes were arranged to reduce the likelihood of immune responses against junctional epitopes. Finally, all the cassettes were codon optimized to enhance expression in mammalian cells. A summary of the TCE cassettes designed, referred to as TCE12 to 15, is shown below in Table 15. The epitopes and order encoded by each of cassettes TCE12 to 15 are shown below in Tables 16A to D, respectively.

TABLE 15
Design of TCE Cassettes

| | TCE12 | TCE13 | TCE14 | TCE15 |
|---|---|---|---|---|
| Size | 990 AA | 781 AA | 598 AA | 385 AA |
| Source | Literature & | Literature & | Literature & | Literature & |
| | EDGE | EDGE | EDGE | EDGE |
| Protein | NSP12, NSP13, | NSP12, NSP13, | NSP12, NSP13, | NSP12, NSP13, |
| targets | NSP8, NSP14, N, | NSP8, NSP14, N, | NSP8, NSP14, N, | NSP14, N, NSP3 |
| | NSP5, NSP3, | NSP5, NSP3, M | NSP5, NSP3 & M | & M |
| | NSP9, M, NSP7 | | | |
| | & NSP4 | | | |
| % WT | 39%, 29%, 35%, | 34%, 19%, 35%, | 31%, 13%, 13%, | 27%, 5%, 3%, |
| Full | 26%, 10%, 22%, | 26%, 10%, 12%, | 12%, 10%, 14%, | 10%, 1%, 15% |
| Length | 2%, 20%, 15%, | 2%, 15% | 1%, 15% | |
| Protein | 22%, 5% | | | |

TABLE 16A
TCE12 Cassette

| | | Start | End | SEQ ID | |
|---|---|---|---|---|---|
| Frame | Gene | aa | aa | NO | Amino Acid Sequence |
| 1 | Nsp12 | 4414 | 4431 | | GTGTSTDVVYRAFDIYN (SEQ ID NO: 27974) |
| 2 | Nsp12 | 4657 | 4676 | | IKWDLLKYDFTEERLKLFD (SEQ ID NO: 27975) |
| 3 | Nsp12 | 4705 | 4745 | | NVLFSTVFPPTSFGPLVRKIFVDGVPFVVSTGYHFRELGV (SEQ |
| | | | | | ID NO: 27976) |
| 4 | Nsp12 | 4751 | 4785 | | NLHSSRLSFKELLVYAADPAMHAASGNLLLDKRT (SEQ ID |
| | | | | | NO: 27977) |
| 5 | Nsp12 | 4814 | 4871 | | AVSKGFFKEGSSVELKHFFFAQDGNAAISDYDYYRYNLPTMC |
| | | | | | DIRQLLFVVEVVDKY (SEQ ID NO: 27978) |
| 6 | Nsp12 | 4878 | 4908 | | CINANQVIVNNLDKSAGFPFNKWGKARLYY (SEQ ID |
| | | | | | NO: 27979) |
| 7 | Nsp12 | 4948 | 4994 | | VAGVSICSTMTNRQFHQKLLKSIAATRGATVVIGTSKFYGGW |
| | | | | | HNML (SEQ ID NO: 27980) |
| 8 | Nsp12 | 5132 | 5154 | | FVNEFYAYLRKHFSMMILSDDA (SEQ ID NO: 27981) |
| 9 | Nsp12 | 5208 | 5235 | | TMLVKQGDDYVYLPYPDPSRILGAGCF (SEQ ID NO: 27982) |
| 10 | Nsp12 | 5241 | 5296 | | TDGTLMIERFVSLAIDAYPLTKHPNQEYADVFHLYLQYIRKL |
| | | | | | HDELTGHMLDMYS (SEQ ID NO: 27983) |
| 11 | Nsp12 | 5303 | 5320 | | TSRYWEPEFYEAMYTPH (SEQ ID NO: 27984) |
| 12 | Nsp13 | 5528 | 5554 | | YGDAVVYRGTTTYKLNVGDYFVLTSH (SEQ ID NO: 27985) |
| 13 | Nsp13 | 5607 | 5646 | | PGTGKSHFAIGLALYYPSARIVYTACSHAAVDALCEKAL (SEQ |
| | | | | | ID NO: 27986) |
| 14 | Nsp13 | 5699 | 5718 | | ISMATNYDLSVVNARLRAK (SEQ ID NO: 27987) |
| 15 | Nsp13 | 5731 | 5743 | | PRTLLTKGTLEPEYFNSVCRLM (SEQ ID NO: 27988) |
| 16 | Nsp13 | 5763 | 5785 | | TCRRCPAEIVDTVSALVYDNKL (SEQ ID NO: 27989) |
| 17 | Nsp13 | 5797 | 5819 | | MFYKGVITHDVSSAINRPQIGV (SEQ ID NO: 27990) |
| 18 | Nsp13 | 5869 | 5895 | | FTQTTETAHSCNVNRENVAITRAKVG (SEQ ID NO: 27991) |
| 19 | nsp8 | 3992 | 4021 | | RDAAMQRKLEKMADQAMTQMYKQARSEDK (SEQ ID |
| | | | | | NO: 27992) |
| 20 | nsp8 | 4085 | 4108 | | GTTFTYASALWEIQQVVDADSKI (SEQ ID NO: 27993) |
| 21 | nsp8 | 4118 | 4135 | | SPNLAWPLIVTALRANS (SEQ ID NO: 27994) |
| 22 | nsp14 | 5972 | 5993 | | DMTYRRLISMMGFKMNYQVNG (SEQ ID NO: 27995) |
| 23 | nsp14 | 6097 | 6130 | | TLKNLSDRVVFVLWAHGFELTSMKYFVKIGPER (SEQ ID |
| | | | | | NO: 27996) |
| 24 | nsp14 | 6183 | 6207 | | LYCQVHGNAHVASCDAIMTRCLAV (SEQ ID NO: 27997) |
| 25 | nsp14 | 6248 | 6267 | | DKFPVLHDIGNPKAIKCVP (SEQ ID NO: 27998) |
| 26 | nsp14 | 6338 | 6355 | | CDGGSLYVNKHAFHTPA (SEQ ID NO: 27999) |
| 27 | nsp14 | 6432 | 6449 | | LWVYKQFDTYNLWNTFT (SEQ ID NO: 28000) |
| 28 | N | 100 | 117 | | MKDLSPRWYFYYLGTGP (SEQ ID NO: 28001) |
| 29 | N | 300 | 323 | | WPQIAQFAPSASAFFGMSRIGME (SEQ ID NO: 28002) |
| 30 | nsp5 | 3355 | 3379 | | TANPKTPKYKFVRIQPGQTFSVLA (SEQ ID NO: 28003) |
| 31 | nsp5 | 3418 | 3440 | | CVSFCYMHHMELPTGVHAGTDL (SEQ ID NO: 28004) |
| 32 | nsp5 | 3547 | 3567 | | ALLEDEFTPFDVVRQCSGVT (SEQ ID NO: 28005) |
| 33 | nsp3 | 1718 | 1736 | | NKTVGELGDVRETMSYLF (SEQ ID NO: 28006) |
| 34 | nsp3 | 2670 | 2694 | | NNYMLTYNKVENMTPRDLGACIDC (SEQ ID NO: 28007) |
| 35 | nsp9 | 4224 | 4247 | | VKYLYFIKGLNNLNRGMVLGSLA (SEQ ID NO: 28008) |
| 36 | M | 131 | 148 | | PLLESELVIGAVILRGH (SEQ ID NO: 28009) |
| 37 | M | 193 | 210 | | AAYSRYRIGNYKLNTDH (SEQ ID NO: 28010) |
| 38 | nsp7 | 3887 | 3905 | | WAQCVQLHNDILLAKDTT (SEQ ID NO: 28011) |
| 39 | nsp4 | 3168 | 3195 | | GVSFSTFEEAALCTFLLNKEMYLKLRS (SEQ ID NO: 28012) |

TABLE 16B
TCE13 Cassette

| | | Start | End | SEQ | |
|---|---|---|---|---|---|
| Frame | Gene | aa | aa | ID NO | Amino Acid Sequence |
| 1 | nsp13 | 5528 | 5554 | | YGDAVVYRGTTTYKLNVGDYFVLTSH (SEQ ID NO: 27985) |
| 2 | nsp12 | 4829 | 4854 | | KHFFFAQDGNAAISDYDYYRYNLPT (SEQ ID NO: 28013) |
| 3 | N | 300 | 323 | | WPQIAQFAPSASAFFGMSRIGME (SEQ ID NO: 28002) |
| 4 | nsp12 | 4878 | 4908 | | CINANQVIVNNLDKSAGFPFNKWGKARLYY (SEQ ID |
| | | | | | NO: 27979) |
| 5 | nsp12 | 5303 | 5320 | | TSRYWEPEFYEAMYTPH (SEQ ID NO: 27984) |
| 6 | nsp8 | 3992 | 4021 | | RDAAMQRKLEKMADQAMTQMYKQARSEDK (SEQ ID |
| | | | | | NO: 27992) |
| 7 | nsp13 | 5607 | 5646 | | PGTGKSHFAIGLALYYPSARIVYTACSHAAVDALCEKAL (SEQ |
| | | | | | ID NO: 27986) |
| 8 | nsp12 | 5208 | 5235 | | TMLVKQGDDYVYLPYPDPSRILGAGCF (SEQ ID NO: 27982) |
| 9 | nsp8 | 4085 | 4108 | | GTTFTYASALWEIQQVVDADSKI (SEQ ID NO: 27993) |
| 10 | nsp13 | 5869 | 5895 | | FTQTTETAHSCNVNRENVAITRAKVG (SEQ ID NO: 27991) |
| 11 | N | 100 | 117 | | MKDLSPRWYFYYLGTGP (SEQ ID NO: 28001) |
| 12 | nsp12 | 5241 | 5296 | | TDGTLMIERFVSLAIDAYPLTKHPNQEYADVFHLYLQYIRKLH |
| | | | | | DELTGHMLDMYS (SEQ ID NO: 27983) |
| 13 | nsp12 | 4705 | 4745 | | NVLFSTVFPPTSFGPLVRKIFVDGVPFVVSTGYHFRELGV (SEQ |
| | | | | | ID NO: 27976) |
| 14 | M | 131 | 148 | | PLLESELVIGAVILRGH (SEQ ID NO: 28009) |
| 15 | nsp3 | 2670 | 2694 | | NNYMLTYNKVENMTPRDLGACIDC (SEQ ID NO: 28007) |
| 16 | nsp14 | 6102 | 6130 | | SDRVVFVLWAHGFELTSMKYFVKIGPER (SEQ ID NO: 28014) |
| 17 | nsp12 | 5132 | 5154 | | FVNEFYAYLRKHFSMMILSDDA (SEQ ID NO: 27981) |
| 18 | nsp13 | 5763 | 5785 | | TCRRCPAEIVDTVSALVYDNKL (SEQ ID NO: 27989) |
| 19 | nsp8 | 4118 | 4135 | | SPNLAWPLIVTALRANS (SEQ ID NO: 27994) |
| 20 | nsp3 | 1718 | 1736 | | NKTVGELGDVRETMSYLF (SEQ ID NO: 28006) |
| 21 | nsp14 | 6432 | 6449 | | LWVYKQFDTYNLWNTFT (SEQ ID NO: 28000) |
| 22 | nsp5 | 3547 | 3567 | | ALLEDEFTPFDVVRQCSGVT (SEQ ID NO: 28005) |
| 23 | nsp12 | 4948 | 4994 | | VAGVSICSTMTNRQFHQKLLKSIAATRGATVVIGTSKFYGGW |
| | | | | | HNML (SEQ ID NO: 27980) |
| 24 | M | 193 | 210 | | AAYSRYRIGNYKLNTDH (SEQ ID NO: 28010) |
| 25 | nsp12 | 4751 | 4785 | | NLHSSRLSFKELLVYAADPAMHAASGNLLLDKRT (SEQ ID |
| | | | | | NO: 27977) |
| 26 | nsp14 | 6183 | 6207 | | LYCQVHGNAHVASCDAIMTRCLAV (SEQ ID NO: 27997) |
| 27 | nsp14 | 5972 | 5993 | | DMTYRRLISMMGFKMNYQVNG (SEQ ID NO: 27995) |
| 28 | nsp14 | 6248 | 6267 | | DKFPVLHDIGNPKAIKCVP (SEQ ID NO: 27998) |
| 29 | nsp5 | 3355 | 3379 | | TANPKTPKYKFVRIQPGQTFSVLA (SEQ ID NO: 28003) |
| 30 | nsp12 | 4414 | 4431 | | GTGTSTDVVYRAFDIYN (SEQ ID NO: 27974) |
| 31 | nsp14 | 6338 | 6355 | | CDGGSLYVNKHAFHTPA (SEQ ID NO: 27999) |

TABLE 16C
TCE14 Cassette

| | | Start | End | SEQ | |
|---|---|---|---|---|---|
| Frame | Gene | aa | aa | ID NO | Amino Acid Sequence |
| 1 | nsp13 | 5528 | 5554 | | YGDAVVYRGTTTYKLNVGDYFVLTSH (SEQ ID NO: 27985) |
| 2 | N | 100 | 117 | | MKDLSPRWYFYYLGTGP (SEQ ID NO: 28001) |
| 3 | nsp12 | 5241 | 5296 | | TDGTLMIERFVSLAIDAYPLTKHPNQEYADVFHLYLQYIRKLHD |
| | | | | | ELTGHMLDMYS (SEQ ID NO: 27983) |
| 4 | nsp12 | 5136 | 5153 | | FYAYLRKHFSMMILSDD (SEQ ID NO: 28015) |
| 5 | nsp14 | 6432 | 6449 | | LWVYKQFDTYNLWNTFT (SEQ ID NO: 28000) |
| 6 | nsp8 | 3996 | 4021 | | MQRKLEKMADQAMTQMYKQARSEDK (SEQ ID NO: 28016) |
| 7 | nsp13 | 5607 | 5636 | | PGTGKSHFAIGLALYYPSARIVYTACSHA (SEQ ID NO: 28017) |
| 8 | nsp12 | 5303 | 5320 | | TSRYWEPEFYEAMYTPH (SEQ ID NO: 27984) |
| 9 | nsp12 | 4878 | 4908 | | CINANQVIVNNLDKSAGFPFNKWGKARLYY (SEQ ID NO: 27979) |
| 10 | nsp5 | 3547 | 3567 | | ALLEDEFTPFDVVRQCSGVT (SEQ ID NO: 28005) |
| 11 | nsp12 | 4948 | 4994 | | VAGVSICSTMTNRQFHQKLLKSIAATRGATVVIGTSKFYGGWH |
| | | | | | NML (SEQ ID NO: 27980) |
| 12 | nsp12 | 5208 | 5235 | | TMLVKQGDDYVYLPYPDPSRILGAGCF (SEQ ID NO: 27982) |
| 13 | M | 193 | 210 | | AAYSRYRIGNYKLNTDH (SEQ ID NO: 28010) |
| 14 | nsp12 | 4751 | 4785 | | NLHSSRLSFKELLVYAADPAMHAASGNLLLDKRT (SEQ ID |
| | | | | | NO: 27977) |
| 15 | nsp12 | 4721 | 4745 | | VRKIFVDGVPFVVSTGYHFRELGV (SEQ ID NO: 28018) |
| 16 | M | 131 | 148 | | PLLESELVIGAVILRGH (SEQ ID NO: 28009) |
| 17 | nsp3 | 2670 | 2694 | | NNYMLTYNKVENMTPRDLGACIDC (SEQ ID NO: 28007) |
| 18 | nsp14 | 6102 | 6130 | | SDRVVFVLWAHGFELTSMKYFVKIGPER (SEQ ID NO: 28014) |
| 19 | nsp12 | 4829 | 4854 | | KHFFFAQDGNAAISDYDYYRYNLPT (SEQ ID NO: 28013) |
| 20 | N | 300 | 323 | | WPQIAQFAPSASAFFGMSRIGME (SEQ ID NO: 28002) |
| 21 | nsp13 | 5763 | 5785 | | TCRRCPAEIVDTVSALVYDNKL (SEQ ID NO: 27989) |
| 22 | nsp5 | 3355 | 3379 | | TANPKTPKYKFVRIQPGQTFSVLA (SEQ ID NO: 28003) |
| 23 | nsp12 | 4414 | 4431 | | GTGTSTDVVYRAFDIYN (SEQ ID NO: 27974) |
| 24 | nsp14 | 6338 | 6355 | | CDGGSLYVNKHAFHTPA (SEQ ID NO: 27999) |

TABLE 16D
TCE15 Cassette

| | | | | SEQ | |
|---|---|---|---|---|---|
| | | Start | End | ID | |
| Frame | Gene | aa | aa | NO | Amino Acid Sequence |
| 1 | N | 300 | 323 | | WPQIAQFAPSASAFFGMSRIGME (SEQ ID NO: 28002) |
| 2 | nsp12 | 5256 | 5296 | | DAYPLTKHPNQEYADVFHLYLQYIRKLHDELTGHMLDMYS (SEQ |
| | | | | | ID NO: 28019) |
| 3 | nsp12 | 5136 | 5153 | | FYAYLRKHFSMMILSDD (SEQ ID NO: 28015) |
| 4 | nsp13 | 5607 | 5636 | | PGTGKSHFAIGLALYYPSARIVYTACSHA (SEQ ID NO: 28017) |
| 5 | nsp12 | 5303 | 5320 | | TSRYWEPEFYEAMYTPH (SEQ ID NO: 27984) |
| 6 | nsp14 | 6338 | 6355 | | CDGGSLYVNKHAFHTPA (SEQ ID NO: 27999) |
| 7 | nsp12 | 4887 | 4905 | | NNLDKSAGFPFNKWGKAR (SEQ ID NO: 27963) |
| 8 | nsp3 | 2675 | 2692 | | TYNKVENMTPRDLGACI (SEQ ID NO: 27965) |
| 9 | nsp12 | 4948 | 4994 | | VAGVSICSTMTNRQFHQKLLKSIAATRGATVVIGTSKFYGGWH |
| | | | | | NML (SEQ ID NO: 27980) |
| 10 | nsp12 | 5208 | 5235 | | TMLVKQGDDYVYLPYPDPSRILGAGCF (SEQ ID NO: 27982) |
| 11 | M | 193 | 210 | | AAYSRYRIGNYKLNTDH (SEQ ID NO: 28010) |
| 12 | nsp12 | 4751 | 4785 | | NLHSSRLSFKELLVYAADPAMHAASGNLLLDKRT (SEQ ID |
| | | | | | NO: 27977) |
| 13 | nsp12 | 4721 | 4745 | | VRKIFVDGVPFVVSTGYHFRELGV (SEQ ID NO: 28018) |
| 14 | M | 131 | 148 | | PLLESELVIGAVILRGH (SEQ ID NO: 28009) |
| 15 | nsp12 | 4829 | 4854 | | KHFFFAQDGNAAISDYDYYRYNLPT (SEQ ID NO: 28013) |
| 16 | N | 100 | 117 | | MKDLSPRWYFYYLGTGP (SEQ ID NO: 28001) |

### Pancorona Sequences

[0634] Certain Pancorona vaccine sequences evaluated herein are presented below in Table 17.

TABLE 17
Pancorona Sequences

Spike-Delta ΔF-2P amino acid sequence: 1271 aa furin mutation in bold and double proline
substitution in bold and italics
MFVFLVLLPLVSSQCVNLRTRTQLPPAYTNSFTRGVYYPDKVFRSSVLHSTQDLFLPFFS
NVTWFHAIHVSGTNGTKRFDNPVLPFNDGVYFASTEKSNIIRGWIFGTTLDSKTQSLLIV
NNATNVVIKVCEFQFCNDPFLDVYYHKNNKSWMESGVYSSANNCTFEYVSQPFLMDL
EGKQGNFKNLREFVFKNIDGYFKIYSKHTPINLVRDLPQGFSALEPLVDLPIGINITRFQT
LLALHRSYLTPGDSSSGWTAGAAAYYVGYLQPRTFLLKYNENGTITDAVDCALDPLSE
TKCTLKSFTVEKGIYQTSNFRVQPTESIVRFPNITNLCPFGEVENATRFASVYAWNRKRI
SNCVADYSVLYNSASFSTFKCYGVSPTKLNDLCFTNVYADSFVIRGDEVRQIAPGQTGK
IADYNYKLPDDFTGCVIAWNSNNLDSKVGGNYNYRYRLFRKSNLKPFERDISTEIYQA
GSKPCNGVEGENCYFPLQSYGFQPTNGVGYQPYRVVVLSFELLHAPATVCGPKKSTNL
VKNKCVNFNFNGLTGTGVLTESNKKFLPFQQFGRDIADTTDAVRDPQTLEILDITPCSF
GGVSVITPGTNTSNQVAVLYQGVNCTEVPVAIHADQLTPTWRVYSTGSNVFQTRAGCL
IGAEHVNNSYECDIPIGAGICASYQTQTNSRGSASSVASQSIIAYTMSLGAENSVAYSNN
SIAIPTNFTISVTTEILPVSMTKTSVDCTMYICGDSTECSNLLLQYGSFCTQLNRALTGIA
VEQDKNTQEVFAQVKQIYKTPPIKDFGGFNFSQILPDPSKPSKRSFIEDLLENKVTLADA
GFIKQYGDCLGDIAARDLICAQKFNGLTVLPPLLTDEMIAQYTSALLAGTITSGWTFGA
GAALQIPFAMQMAYRENGIGVTQNVLYENQKLIANQFNSAIGKIQDSLSSTASALGKLQ
NVVNQNAQALNTLVKQLSSNFGAISSVLNDILSRLDPPEAEVQIDRLITGRLQSLQTYV
TQQLIRAAEIRASANLAATKMSECVLGQSKRVDFCGKGYHLMSFPQSAPHGVVFLHVT
YVPAQEKNFTTAPAICHDGKAHFPREGVFVSNGTHWFVTQRNFYEPQIITTDNTFVSGN
CDVVIGIVNNTVYDPLQPELDSFKEELDKYFKNHTSPDVDLGDISGINASVVNIQKEIDR
LNEVAKNLNESLIDLQELGKYEQYIKWPWYIWLGFIAGLIAIVMVTIMLCCMTSCCSCL
KGCCSCGSCCKFDEDDSEPVLKGVKLHYT (SEQ ID NO: 28020)
KP886809 RBD: 204 aa with SARS-COV2 leader sequence in bold italic
MFVFLVLLPLVSSRVAPVTEVVRFPNITNLCPFDKVFNATRFPSVYAWERTKISDCVAD
YTVFYNSTSFSTENCYGVSPSKLIDLCFTSVYADTFLIRFSEVRQVAPGQTGVIADYNYK
LPDDFTGCVIAWNTAKYDVGSYFYRSHRSSKLKPFERDLSSEENGARTLSTYDFNQNV
PLEYQATRVVVLSFELLNAPATVCGPKLSTSLVKNQCVNF(SEQ ID NO: 28021)
KJ473815 RBD: 205 aa with SARS-COV2 leader sequence in bold italic
MFVFLVLLPLVSSRVSPTQEVVRFPNITNRCPFDKVFNATRFPNVYAWERTKISDCVAD
YTVLYNSTSFSTFKCYGVSPSKLIDLCFTSVYADTFLIRSSEVRQVAPGETGVIADYNYK
LPDDFTGCVIAWNTAKQDTGNYYYRSHRKTKLKPFERDLSSDDGNGVYTLSTYDFNP
NVPVAYQATRVVVLSFELLNAPATVCGPKLSTQLVKNQCVNF (SEQ ID NO: 28022)
MK211376 RBD 222 aa with SARS-COV2 leader sequence in bold italic
MFVFLVLLPLVSSRVAPSKEVVRFPNITNLCPFGEVENATTFPSVYAWERKRISNCVAD
YSVLYNSTSFSTFKCYGVSATKLNDLCFSNVYADSFVVKGDDVRQIAPGQTGVIADYN
YKLPDDFMGCVLAWNTRNIDATSTGNYNYKYRSLRHGKLRPFERDISNVPFSPDGKPC
TPPAFNCYWPLNDYGFFTTNGIGYQPYRVVVLSFELLNAPATVCGPKLSTDLIKNQCVN
F (SEQ ID NO: 28023)
DQ648856 RBD 204 aa with SARS-COV2 leader sequence in bold italic
MFVFLVLLPLVSSRVSPVTEVVRFPNITNLCPFDKVFNATRFPSVYAWERTKISDCVAD
YTVFYNSTSFSTENCYGVSPSKLIDLCFTSVYADTFLIRFSEVRQVAPGQTGVIADYNYK
LPDDFTGCVIAWNTAKQDVGSYFYRSHRSSKLKPFERDLSSVEENGRTLSTYDFNQNV
PLEYQATRVVVLSFELLNAPATVCGPKLSTSLVKNQCVNF (SEQ ID NO: 28024)
GQ153542 RBD 205 aa with SARS-COV2 leader sequence in bold italic
MFVFLVLLPLVSSRVSPTQEVIRFPNITNRCPFDRVFNASRFPSVYAWERTKISECVADY
TVLYNSTSFSTFKCYGVSPSKLIDLCFTSVYADTFLIRSSEVRQVAPGETGVIADYNYKL
PDDFTGCVIAWNTAKQDTGNYYYRSHRKTKLKPFERDLSSDDGNGVYTLSTYDFNPN
VPVAYQATRVVVLSFELLNAPATVCGPKLSTQLVKNQCVNF (SEQ ID NO: 28025)
JX993988.1RBD 204 aa with SARS-COV2 leader sequence in bold italic
MFVFLVLLPLVSSRVSPSTEVIRFPNITNRCPFDRVENASRFPSVYAWERTKISDCVADY
TVLYNSTSFSTFKCYGVSPSKLIDLCFTSVYADTFLIRFSEVRQIAPGETGVIADYNYKLP
DEFTGCVIAWNTANQDRGQYYYRSSRKTKLKPFERDLSSDENGVRTLSTYDFYPSVPL
EYQATRVVVLSFELLNAPATVCGPKLSTSLIKNQCVNF (SEQ ID NO: 28026)
NC_004718 RBD 204 aa with SARS-COV2 leader sequence in bold italic
MFVFLVLLPLVSSRVVPSGDVVRFPNITNLCPFGEVFNATKFPSVYAWERKKISNCVAD
YSVLYNSTFFSTFKCYGVSATKLNDLCFSNVYADSFVVKGDDVRQIAPGQTGVIADYN
YKLPDDFMGCVLAWNTRNIDATSTGNYNYKYRYLRHGKLRPFERDISNVPFSPDGKPC
TPPALNCYWPLNDYGFYTTTGIGYQPYRVVVLSFELLNAPATVCGPKLSTDLIKNQCV
NF (SEQ ID NO: 28027)
T4 Fibritin Trimerization Domain
GYIPEAPRDGQAYVRKDGEWVFLSTFLSPA (SEQ ID NO: 28028)
MTQ Trimerization Domain
GGSGGIKEEIAKIKEEQAKIKEKIAEIEKRIAEIEKRIAGGCC (SEQ ID NO: 28029)
GCN4 Trimerization Domain
RMKQIEDKIEEILSKIYHIENEIARIKKLIGER (SEQ ID NO: 28030)
Group 2 3X RBD Protein Sequence Example with Trimerization domains, linkers, T2A
and Furin sites 859 aa
MFVFLVLLPLVSSRVSPVTEVVRFPNITNLCPFDKVFNATRFPSVYAWERTKISDCVAD
YTVFYNSTSFSTENCYGVSPSKLIDLCFTSVYADTFLIRFSEVRQVAPGQTGVIADYNYK
LPDDFTGCVIAWNTAKQDVGSYFYRSHRSSKLKPFERDLSSVEENGRTLSTYDFNQNV
PLEYQATRVVVLSFELLNAPATVCGPKLSTSLVKNQCVNFGGSGGSGGYIPEAPRDGQ
AYVRKDGEWVFLSTFLSPAGGSGGVRAEGRGSLLTCGDVEENPGPRRRARMFVFLVL
LPLVSSRVSPTQEVVRFPNITNRCPFDKVFNATRFPNVYAWERTKISDCVADYTVLYNS
TSFSTFKCYGVSPSKLIDLCFTSVYADTFLIRSSEVRQVAPGETGVIADYNYKLPDDFTG
CVIAWNTAKQDTGNYYYRSHRKTKLKPFERDLSSDDGNGVYTLSTYDFNPNVPVAYQ
ATRVVVLSFELLNAPATVCGPKLSTQLVKNQCVNFGGSGGSGGGSGGIKEEIAKIKEEQ
AKIKEKIAEIEKRIAEIEKRIAGGCCGGSGGVRAEGRGSLLTCGDVEENPGPRRRARMFV
FLVLLPLVSSRVAPSKEVVRFPNITNLCPFGEVENATTFPSVYAWERKRISNCVADYSVL
YNSTSFSTFKCYGVSATKLNDLCFSNVYADSFVVKGDDVRQIAPGQTGVIADYNYKLP
DDFMGCVLAWNTRNIDATSTGNYNYKYRSLRHGKLRPFERDISNVPFSPDGKPCTPPA
FNCYWPLNDYGFFTTNGIGYQPYRVVVLSFELLNAPATVCGPKLSTDLIKNQCVNFGG
SGGSGRMKQIEDKIEEILSKIYHIENEIARIKKLIGER (SEQ ID NO: 28031)
Codon optimized SARS-COV-2 Delta Sequence, Kozak sequence in bold italic
GCCACCATGTTTGTCTTCCTGGTCTTGCTGCCGCTGGTGAGCAGCCAGTGCGTGAAT
CTCcgCACCCGCACCCAGCTTCCACCTGCCTACACTAACAGCTTCACCCGAGGGGTG
TATTACCCTGACAAGGTATTCCGGTCCTCCGTCCTCCATAGCACGCAGGACCTTTTT
CTGCCCTTCTTCTCAAATGTGACATGGTTCCATGCCATTCACGTGAGCGGCACGAAT
GGAACGAAGCGCTTTGATAACCCCGTGCTGCCTTTCAATGACGGCGTCTACTTCGC
CTCCACTGAAAAGTCAAACATCATCCGGGGCTGGATCTTTGGCACCACTCTTGATT
CAAAGACCCAGTCACTGCTGATTGTGAACAATGCTACAAACGTGGTTATCAAGGTG
TGTGAGTTTCAGTTCTGTAACGATCCATTTTTGGatGTGTACTACCACAAGAACAAC
AAGTCCTGGATGgAGTCTgGAGTGTATAGCTCTGCTAACAACTGCACCTTCGAGTAC
GTGTCCCAGCCTTTCCTTATGGACCTGGAAGGCAAACAGGGCAATTTCAAAAACCT
GAGAGAGTTCGTGTTTAAGAACATTGACGGATACTTCAAAATTTATTCTAAGCACA
CACCAATTAACTTAGTGCGGGACCTACCCCAAGGCTTTAGCGCCCTAGAGCCCCTG
GTTGACCTGCCCATTGGGATCAATATAACAAGGTTCCAAACTCTACTGGCTCTGCA
TAGAAGTTATCTGACCCCAGGAGACAGCTCTAGTGGTTGGACCGCCGGCGCAGCAG
CCTACTATGTCGGGTACTTACAGCCACGCACGTTCCTTCTGAAGTACAATGAGAAC
GGGACAATCACTGACGCAGTAGACTGTGCACTGGACCCGCTAAGCGAGACTAAGT
GCACACTTAAATCCTTCACGGTGGAGAAAGGCATTTATCAGACCTCTAACTTCAGG
GTGCAGCCAACAGAAAGCATTGTGCGATTCCCAAATATTACTAATCTTTGCCCTTTC
GGGGAGGTCTTTAATGCAACTAGATTCGCATCAGTCTATGCGTGGAACCGCAAACG
CATTTCCAATTGTGTCGCAGACTACTCAGTGCTGTACAACTCTGCCTCTTTCAGTAC
GTTCAAGTGTTACGGAGTGTCACCCACTAAACTGAACGACCTGTGCTTTACAAATG
TCTACGCTGACTCCTTCGTGATTAGGGGAGACGAGGTGAGACAAATTGCCCCCGGA
CAGACTGGGAAGATTGCCGACTACAATTATAAGCTTCCTGATGATTTCACTGGCTG
TGTTATTGCCTGGAATAGTAACAATCTGGATAGCAAGGTGGGAGGCAACTATAACT
ACagaTATCGACTGTTTAGGAAGAGTAATCTGAAACCATTTGAGCGGGATATTTCCA
CAGAAATTTACCAGGCCGGGAGCAaACCATGTAATGGGGTGGAGGGATTTAATTGT
TACTTCCCACTCCAGAGCTATGGTTTCCAACCCACCAATGGAGTGGGTTACCAGCC
CTATAGAGTCGTGGTGCTTAGTTTTGAGCTGCTTCACGCCCCAGCAACCGTCTGCGG
TCCCAAAAAGTCGACCAATCTCGTGAAAAACAAATGCGTAAACTTCAACTTTAACG
GCTTAACAGGAACCGGCGTGCTCACCGAAAGCAACAAGAAATTCCTTCCATTTCAG
CAATTCGGAAGGGACATCGCCGACACAACAGACGCGGTGAGGGACCCACAGACTC
TGGAGATACTGGACATCACTCCTTGTTCGTTTGGGGGCGTCTCGGTCATCACACCCG
GGACTAATACTAGTAATCAGGTAGCAGTTTTATATCAAGGCGTCAACTGTACCGAA
GTACCTGTGGCCATACACGCTGATCAGCTAACGCCAACATGGCGAGTCTATTCCAC
CGGCTCTAACGTTTTTCAGACCAGGGCTGGGTGCCTGATAGGGGCAGAGCACGTCA
ATAATTCCTATGAGTGTGATATCCCCATAGGTGCGGGGATCTGTGCCAGCTATCAA
ACCCAAACCAATTCACgAgGGaGcGCAaGcTCTGTGGCTTCTCAGAGCATAATTGCAT
ATACAATGTCACTGGGCGCTGAGAATAGCGTTGCATACTCTAATAACAGCATAGCC
ATTCCCACGAACTTTACTATCAGTGTGACAACCGAAATATTGCCAGTTTCGATGAC
CAAAACTAGCGTGGATTGCACGATGTACATCTGTGGAGACTCTACCGAATGCAGCA
ATCTGCTATTACAATATGGCAGCTTCTGTACACAGTTAAATCGAGCCTTGACAGGC
ATCGCAGTGGAACAGGACAAAAATACTCAAGAGGTGTTTGCACAGGTGAAGCAAA
TCTACAAAACGCCCCCCATTAAAGATTTTGGCGGGTTCAATTTTTCACAAATTCTCC
CCGACCCGTCTAAGCCGAGTAAGCGGTCCTTCATCGAAGATCTGCTCTTTAACAAA
GTAACCCTCGCCGATGCCGGCTTTATTAAGCAGTATGGCGACTGCCTGGGGGATAT
AGCCGCTCGTGACCTGATTTGCGCCCAGAAGTTCAATGGTCTGACCGTGTTGCCTCC
TTTATTGACCGATGAAATGATTGCCCAGTACACTAGTGCCCTGCTGGCCGGCACTA
TCACGTCTGGGTGGACCTTCGGAGCTGGTGCCGCCTTGCAGATACCTTTTGCAATGC
AGATGGCCTATAGGTTTAATGGTATCGGAGTGACTCAGAACGTACTGTACGAGAAC
CAGAAGCTCATCGCTAATCAATTTAACTCCGCTATCGGAAAAATCCAGGACAGCCT
CTCTTCTACAGCTAGCGCTCTGGGCAAACTGCAGaATGTCGTTAATCAGAATGCCCA
GGCCCTGAACACCTTGGTTAAACAACTATCTTCCAACTTCGGGGCCATATCCAGTG
TGTTGAATGATATTCTCTCCCGCTTGGATccacctGAAGCTGAGGTGCAGATCGATCGC
TTGATCACCGGCAGACTGCAGTCCCTCCAGACATATGTAACTCAGCAGCTGATTAG
AGCCGCCGAGATAAGGGCAAGTGCGAATCTGGCTGCCACCAAGATGAGCGAATGT
GTATTGGGCCAGAGCAAACGAGTTGATTTTTGCGGTAAGGGGTATCATTTAATGTC
TTTCCCTCAATCCGCACCTCATGGCGTAGTTTTCCTGCATGTGACTTATGTCCCGGC
TCAGGAGAAGAATTTTACCACAGCCCCCGCGATCTGCCATGACGGAAAGGCCCACT
TCCCCCGGGAAGGCGTGTTTGTATCCAATGGGACTCACTGGTTTGTCACTCAGCGA
AATTTTTATGAACCACAGATCATCACCACTGACAACACATTTGTTAGTGGAAACTG
CGATGTGGTCATCGGCATCGTGAATAACACTGTCTATGATCCACTGCAACCTGAAC
TGGATTCTTTTAAAGAGGAACTCGACAAGTATTTTAAAAACCACACTAGCCCTGAC
GTGGATCTCGGTGACATTTCTGGCATCAACGCTAGCGTAGTGAACATTCAGAAAGA
GATAGATAGACTTAATGAGGTGGCCAAGAACCTCAACGAAAGTCTGATCGACCTCC
AGGAACTGGGGAAATACGAGCAGTACATTAAATGGCCTTGGTACATATGGCTGGG
GTTCATTGCTGGGCTGATCGCAATAGTGATGGTGACCATAATGCTCTGTTGCATGA
CTAGCTGCTGCAGCTGCCTGAAGGGCTGCTGTAGTTGTGGGTCATGTTGTAAGTTTG
ACGAAGATGATAGCGAGCCTGTCCTTAAAGGAGTGAAGCTCCACTACACCTAGTAA
(SEQ ID NO: 28032)
Group 2 3X RBD Sequence Codon Optimized Sequence; Kozak sequence in bold italic
GCCACCATGTTTGTCTTCCTGGTCTTGCTGCCGCTGGTGAGCAGCCGCGTGTCTCCC
GTTACTGAAGTCGTCCGGTTCCCAAACATCACAAATCTCTGTCCTTTTGACAAAGTG
TTTAATGCTACGCGCTTTCCTTCTGTATACGCCTGGGAGCGGACCAAGATCTCAGAT
TGCGTGGCCGACTACACCGTGTTCTATAATTCCACCTCCTTCAGCACCTTCAACTGC
TACGGCGTGAGCCCATCTAAACTGATTGATTTGTGCTTTACGAGTGTGTACGCGGA
TACTTTCCTGATTAGGTTTTCGGAAGTTCGTCAAGTAGCCCCCGGCCAGACGGGAG
TGATAGCTGATTACAACTATAAACTGCCTGATGACTTCACCGGCTGTGTAATAGCG
TGGAATACGGCTAAGCAGGATGTAGGCTCCTACTTCTATCGTTCGCACCGGTCGTC
GAAATTAAAGCCGTTTGAGCGTGACCTCTCGTCAGTAGAGGAAAACGGTAGAACG
CTGAGCACCTATGACTTTAATCAAAACGTGCCCTTAGAGTATCAGGCCACTAGAGT
AGTAGTCCTCTCATTTGAACTGTTAAATGCACCCGCAACAGTTTGTGGGCCGAAGT
TGAGCACTAGCCTAGTTAAGAACCAGTGTGTGAACTTCGGAGGTAGCGGCGGTTCT
GGAGGCTACATTCCAGAAGCTCCACGCGATGGCCAGGCTTATGTGCGGAAAGATG
GCGAGTGGGTGTTTCTCAGCACCTTTCTGAGTCCAGCTGGCGGTAGCGGCGGGGTT
CGGGCAGAGGGCAGAGGCTCACTGCTCACGTGTGGTGATGTAGAAGAGAATCCAG
GTCCTAGGAGGCGAGCACGGATGTTCGTATTTCTGGTGCTGCTGCCCCTAGTGAGC
TCCAGGGTGTCGCCCACCCAGGAGGTAGTGAGGTTCCCTAACATAACTAATCGGTG
CCCCTTTGATAAAGTTTTTAACGCCACTAGATTCCCAAATGTGTATGCATGGGAGA
GAACTAAAATTTCAGACTGCGTCGCTGACTACACCGTGTTGTATAATAGTACCAGT
TTCAGTACATTCAAGTGTTACGGCGTGTCCCCTTCCAAACTCATCGACCTTTGCTTC
ACCAGCGTCTACGCGGATACTTTTCTTATTAGATCTTCGGAGGTCCGCCAGGTAGC
ACCAGGGGAAACAGGAGTAATAGCTGATTATAACTACAAACTACCAGACGATTTC
ACAGGTTGCGTGATCGCCTGGAACACAGCTAAGCAGGACACGGGAAATTACTACT
ATAGGAGCCATAGGAAGACCAAGCTCAAGCCTTTTGAGAGAGATCTGTCTTCTGAC
GACGGAAATGGCGTTTATACACTGTCAACCTACGACTTCAATCCTAATGTGCCCGT
TGCCTACCAGGCCACCAGAGTCGTGGTGCTGAGCTTCGAGCTGCTGAACGCCCCTG
CTACAGTCTGCGGCCCTAAGCTGAGCACACAGCTGGTGAAGAATCAGTGTGTGAAT
TTTGGAGGTAGCGGCGGTTCTGGAGGGGGGTCTGGAGGCATAAAGGAAGAGATTG
CCAAGATTAAGGAAGAACAGGCAAAGATAAAAGAAAAGATTGCAGAGATTGAAA
AAAGGATTGCTGAGATCGAGAAAAGGATAGCAGGAGGTTGTTGCGGCGGTAGCGG
CGGTGTCCGTGCTGAAGGACGCGGGTCCCTTCTCACCTGCGGCGACGTTGAGGAAA
ACCCTGGCCCTAGAAGGCGAGCACGGATGTTCGTGTTCCTGGTGCTTCTCCCTCTGG
TGTCTAGCCGTGTGGCCCCCAGCAAGGAAGTCGTGCGCTTCCCCAACATCACAAAT
CTCTGTCCTTTTGGAGAGGTCTTCAATGCAACCACATTCCCTTCCGTGTACGCCTGG
GAGAGAAAACGGATTTCCAACTGCGTGGCTGACTACAGCGTGCTTTATAATTCTAC
CAGTTTCTCTACCTTCAAATGCTACGGCGTGTCTGCCACAAAACTAAATGATCTGTG
CTTCAGCAATGTGTATGCCGACAGCTTTGTTGTGAAGGGAGATGATGTGCGGCAGA
TTGCACCCGGCCAGACCGGGGTTATCGCCGACTACAACTATAAGCTGCCCGATGAC
TTCATGGGCTGCGTGCTCGCTTGGAACACAAGAAACATTGATGCCACCTCAACCGG
AAACTACAATTACAAATATCGAAGCTTGCGGCACGGGAAACTGAGGCCATTTGAA
AGGGACATCAGCAACGTGCCCTTCTCACCGGATGGAAAGCCATGCACCCCCCCTGC
CTTTAATTGCTACTGGCCCCTGAACGACTATGGCTTCTTCACAACCAATGGCATTGG
ATATCAGCCCTACAGAGTGGTGGTGCTGAGTTTTGAGCTGCTGAACGCTCCCGCTA
CAGTGTGCGGACCCAAGCTCAGCACAGACCTGATCAAGAACCAGTGTGTGAACTTC
GGAGGTAGCGGCGGTTCTGGAAGAATGAAACAGATTGAGGATAAAATTGAAGAGA
TATTGTCAAAGATCTATCACATAGAGAACGAAATCGCCCGAATAAAGAAGCTGATT
GGGGAACGCTAGTGA (SEQ ID NO: 28033)
Group 1 3X RBD Sequence Codon Optimized Sequence; Kozak sequence in bold italic
GCCACCATGTTTGTCTTCCTGGTCTTGCTGCCGCTGGTGAGCAGCAGGGTAGCGCCC
GTGACTGAGGTAGTCCGCTTCCCCAACATCACCAACCTGTGCCCATTTGATAAAGT
GTTCAATGCCACAAGGTTCCCATCTGTATACGCATGGGAACGGACCAAAATTAGTG
ACTGTGTGGCCGATTACACCGTGTTTTACAACAGTACCTCTTTTTCCACATTCAACT
GCTATGGAGTTTCTCCTTCAAAGCTTATCGATCTATGTTTCACTTCTGTTTACGCTGA
CACTTTTCTGATCCGTTTCTCAGAAGTCCGACAGGTCGCCCCTGGTCAAACAGGGG
TGATAGCGGATTATAATTACAAGCTTCCGGATGACTTCACTGGCTGCGTTATTGCTT
GGAACACTGCCAAATATGACGTCGGCTCATACTTCTATCGCTCACACCGGTCGAGC
AAGCTCAAGCCTTTTGAAAGGGATCTCAGCAGCGAGGAGAATGGGGCCAGAACCC
TGAGCACCTATGACTTTAACCAGAATGTGCCACTGGAATACCAGGCTACGAGAGTG
GTGGTCCTGAGCTTCGAGCTGTTGAATGCACCCGCAACAGTTTGTGGCCCTAAACT
GTCCACAAGCCTGGTGAAGAATCAGTGTGTAAACTTTGGAGGTAGCGGCGGTTCTG
GAGGCTACATTCCAGAAGCTCCACGCGATGGCCAGGCTTATGTGCGGAAAGATGG
CGAGTGGGTGTTTCTCAGCACCTTTCTGAGTCCAGCTGGCGGTAGCGGCGGGGTTC
GGGCAGAGGGCAGAGGCTCACTGCTCACGTGTGGTGATGTAGAAGAGAATCCAGG
TCCTAGGAGGCGAGCACGGATGTTCGTATTTCTGGTGCTGCTGCCCCTAGTGAGCT
CCAGGGTGTCGCCCACCCAGGAGGTAGTGAGGTTCCCTAACATAACTAACCGGTGC
CCCTTTGATAAAGTTTTTAACGCCACTAGATTCCCAAATGTGTATGCATGGGAGAG
AACTAAAATTTCAGACTGCGTCGCTGACTACACCGTGTTGTATAATAGTACCAGTTT
CAGTACATTCAAGTGTTACGGCGTGTCCCCTTCCAAACTCATCGACCTTTGCTTCAC
CAGCGTCTACGCGGATACTTTTCTTATTAGATCTTCGGAGGTCCGCCAGGTAGCACC
AGGGGAAACAGGAGTAATAGCTGATTATAACTACAAACTACCAGACGATTTCACA
GGTTGCGTGATCGCCTGGAACACAGCTAAGCAGGACACGGGAAATTACTACTATA
GGAGCCATAGGAAGACCAAGCTCAAGCCTTTTGAGAGAGATCTGTCTTCTGACGAC
GGAAATGGCGTTTATACACTGTCAACCTACGACTTCAATCCTAATGTGCCCGTTGCC
TACCAGGCCACCAGAGTCGTGGTGCTGAGCTTCGAGCTGCTGAACGCCCCTGCTAC
AGTCTGCGGCCCTAAGCTGAGCACACAGCTGGTGAAGAATCAGTGTGTGAATTTTG
GAGGTAGCGGCGGTTCTGGAGGGGGGTCTGGAGGCATAAAGGAAGAGATTGCCAA
GATTAAGGAAGAACAGGCAAAGATAAAAGAAAAGATTGCAGAGATTGAAAAAAG
GATTGCTGAGATCGAGAAAAGGATAGCAGGAGGTTGTTGCGGCGGTAGCGGCGGT
GTCCGTGCTGAAGGACGCGGGTCCCTTCTCACCTGCGGCGACGTTGAGGAAAACCC
TGGCCCTAGAAGGCGAGCACGGATGTTCGTGTTCCTGGTGCTTCTCCCTCTGGTGTC
TAGCCGTGTGGCCCCCAGCAAGGAAGTCGTGCGCTTCCCCAACATCACAAATCTCT
GTCCTTTTGGAGAGGTCTTCAATGCAACCACATTCCCTTCCGTGTACGCCTGGGAGA
GAAAACGGATTTCCAACTGCGTGGCTGACTACAGCGTGCTTTATAATTCTACCAGT
TTCTCTACCTTCAAATGCTACGGCGTGTCTGCCACAAAACTAAATGATCTGTGCTTC
AGCAATGTGTATGCCGACAGCTTTGTTGTGAAGGGAGATGATGTGCGGCAGATTGC
ACCCGGCCAGACCGGGGTTATCGCCGACTACAACTATAAGCTGCCCGATGACTTCA
TGGGCTGCGTGCTCGCTTGGAACACAAGAAACATTGATGCCACCTCAACCGGAAAC
TACAATTACAAATATCGAAGCTTGCGGCACGGGAAACTGAGGCCATTTGAAAGGG
ACATCAGCAACGTGCCCTTCTCACCGGATGGAAAGCCATGCACCCCCCCTGCCTTT
AATTGCTACTGGCCCCTGAACGACTATGGCTTCTTCACAACCAATGGCATTGGATA
TCAGCCCTACAGAGTGGTGGTGCTGAGTTTTGAGCTGCTGAACGCTCCCGCTACAG
TGTGCGGACCCAAGCTCAGCACAGACCTGATCAAGAACCAGTGTGTGAACTTCGGA
GGTAGCGGCGGTTCTGGAAGAATGAAACAGATTGAGGATAAAATTGAAGAGATAT
TGTCAAAGATCTATCACATAGAGAACGAAATCGCCCGAATAAAGAAGCTGATTGG
GGAACGCTAGTGA (SEQ ID NO: 28034)
Group 3 3X RBD Sequence Codon Optimized Sequence; Kozak sequence in bold italic
GCCACCATGTTTGTCTTCCTGGTCTTGCTGCCGCTGGTGAGCAGCCGTGTGTCTCCC
ACCCAGGAAGTGATTAGATTTCCAAATATCACCAACCGCTGCCCTTTCGATAGGGT
GTTTAACGCCTCCAGGTTCCCAAGCGTCTACGCCTGGGAGAGAACCAAGATCAGCG
AATGTGTCGCCGACTACACAGTGCTGTATAATTCAACCTCTTTTTCCACATTCAAGT
GCTATGGAGTGTCACCATCTAAACTCATCGACTTATGTTTTACCAGCGTGTATGCAG
ACACCTTCTTGATCAGGTCCAGCGAGGTCAGACAGGTGGCACCTGGCGAAACCGGC
GTCATTGCTGACTACAATTACAAGCTGCCTGATGATTTTACCGGTTGCGTTATTGCC
TGGAACACAGCAAAACAGGATACCGGAAATTACTATTATCGTTCCCACCGGAAGA
CTAAGCTGAAACCCTTCGAGCGAGATCTTTCGTCAGACGACGGAAATGGGGTGTAC
ACACTTTCCACGTACGACTTCAATCCTAATGTGCCAGTGGCCTACCAGGCCACCAG
AGTCGTGGTGCTCTCATTTGAGCTGCTGAATGCCCCTGCTACAGTCTGTGGCCCCAA
ACTGTCCACTCAACTGGTGAAGAACCAGTGTGTGAACTTCGGAGGTAGCGGCGGTT
CTGGAGGCTACATTCCAGAAGCTCCACGCGATGGCCAGGCTTATGTGCGGAAAGAT
GGCGAGTGGGTGTTTCTCAGCACCTTTCTGAGTCCAGCTGGCGGTAGCGGCGGGGT
TCGGGCAGAGGGCAGAGGCTCACTGCTCACGTGTGGTGATGTAGAAGAGAATCCA
GGTCCTAGGAGGCGAGCACGGATGTTCGTATTTCTGGTGCTGCTGCCCCTAGTGAG
CTCCCGAGTTTCCCCCAGCACCGAGGTCATCAGGTTCCCTAACATCACCAACAGGT
GCCCTTTTGACAGAGTCTTCAACGCGTCTCGATTTCCGTCCGTGTACGCCTGGGAGC
GGACAAAGATTAGCGATTGTGTGGCCGACTACACTGTCCTCTACAATTCGACCAGC
TTTAGTACCTTCAAGTGCTATGGGGTCTCACCATCCAAACTAATTGATCTGTGTTTC
ACTTCTGTTTATGCGGATACTTTTCTCATAAGATTTTCGGAAGTACGACAGATCGCC
CCAGGCGAAACGGGAGTGATCGCTGACTACAACTATAAACTGCCCGACGAATTCA
CAGGATGCGTGATAGCTTGGAATACTGCCAACCAAGACAGGGGGCAGTATTACTA
CCGGTCCTCACGAAAAACGAAGTTGAAGCCCTTCGAGAGAGATTTGTCTAGCGACG
AAAATGGCGTTAGAACACTTTCAACCTATGACTTTTACCCTAGTGTGCCACTTGAGT
ATCAGGCTACCCGCGTGGTGGTCCTGAGCTTCGAGTTACTGAATGCACCTGCCACA
GTATGTGGTCCGAAGCTGTCTACCAGCCTCATTAAAAATCAGTGCGTGAATTTCGG
AGGTAGCGGCGGTTCTGGAGGGGGGTCTGGAGGCATAAAGGAAGAGATTGCCAAG
ATTAAGGAAGAACAGGCAAAGATAAAAGAAAAGATTGCAGAGATTGAAAAAAGG
ATTGCTGAGATCGAGAAAAGGATAGCAGGAGGTTGTTGCGGCGGTAGCGGCGGTG
TCCGTGCTGAAGGACGCGGGTCCCTTCTCACCTGCGGCGACGTTGAGGAAAACCCT
GGCCCTAGAAGGCGAGCACGGATGTTCGTGTTCCTGGTGCTTCTCCCTCTGGTGTCT
AGCAGGGTAGTGCCCAGTGGAGACGTGGTCCGGTTCCCTAACATCACCAACCTGTG
TCCCTTCGGGGAGGTGTTCAATGCCACCAAGTTCCCCAGTGTTTATGCATGGGAGA
GGAAGAAGATCTCCAACTGTGTGGCTGATTACTCTGTCCTGTACAACAGCACCTTC
TTCTCCACATTTAAATGTTATGGCGTTTCTGCTACCAAGCTGAATGACCTCTGCTTC
TCTAACGTGTATGCTGACAGTTTTGTGGTGAAGGGAGATGATGTTAGACAGATTGC
TCCTGGGCAGACCGGCGTCATTGCAGATTATAATTATAAACTCCCAGATGACTTCA
TGGGCTGCGTGCTCGCCTGGAATACCAGAAATATCGACGCTACTTCAACCGGAAAC
TACAATTACAAGTACCGGTACCTGAGACACGGGAAACTGAGACCATTCGAGCGGG
ACATTAGCAATGTGCCTTTCAGCCCCGATGGAAAGCCCTGCACTCCTCCTGCCCTG
AACTGCTACTGGCCCCTCAATGATTACGGCTTCTACACCACCACTGGAATTGGCTA
CCAGCCCTACAGAGTGGTTGTGCTGTCATTTGAGCTGCTGAACGCCCCAGCCACAG
TCTGTGGCCCCAAACTATCCACTGACCTGATTAAGAACCAGTGCGTGAACTTCGGA
GGTAGCGGCGGTTCTGGAAGAATGAAACAGATTGAGGATAAAATTGAAGAGATAT
TGTCAAAGATCTATCACATAGAGAACGAAATCGCCCGAATAAAGAAGCTGATTGG
GGAACGCTAGTGA (SEQ ID NO: 28035)
TCE12: TCE is shown in bold (990 amino acids); MAG is lowercase and class II helper
domain and linkers in italics
magYGDAVVYRGTTTYKLNVGDYFVLTSHIKWDLLKYDFTEERLKLFDLWVYKQ
FDTYNLWNTFTTSRYWEPEFYEAMYTPHRDAAMQRKLEKMADQAMTQMYKQA
RSEDKALLEDEFTPFDVVRQCSGVTVAGVSICSTMTNRQFHQKLLKSIAATRGAT
VVIGTSKFYGGWHNMLGVSFSTFEEAALCTFLLNKEMYLKLRSDKFPVLHDIGNP
KAIKCVPTANPKTPKYKFVRIQPGQTFSVLAGTGTSTDVVYRAFDIYNCVSFCYMH
HMELPTGVHAGTDLWPQIAQFAPSASAFFGMSRIGMECINANQVIVNNLDKSAGF
PFNKWGKARLYYMFYKGVITHDVSSAINRPQIGVFVNEFYAYLRKHFSMMILSDD
ATCRRCPAEIVDTVSALVYDNKLSPNLAWPLIVTALRANSNKTVGELGDVRETMS
YLFLYCQVHGNAHVASCDAIMTRCLAVDMTYRRLISMMGFKMNYQVNGFTQTT
ETAHSCNVNRENVAITRAKVGMKDLSPRWYFYYLGTGPTDGTLMIERFVSLAIDA
YPLTKHPNQEYADVFHLYLQYIRKLHDELTGHMLDMYSNVLFSTVFPPTSFGPLV
RKIFVDGVPFVVSTGYHFRELGVPLLESELVIGAVILRGHNNYMLTYNKVENMTP
RDLGACIDCGTTFTYASALWEIQQVVDADSKIWAQCVQLHNDILLAKDTTPGTGK
SHFAIGLALYYPSARIVYTACSHAAVDALCEKALTMLVKQGDDYVYLPYPDPSRIL
GAGCFAAYSRYRIGNYKLNTDHNLHSSRLSFKELLVYAADPAMHAASGNLLLDKR
TPRTLLTKGTLEPEYFNSVCRLMVKYLYFIKGLNNLNRGMVLGSLAISMATNYDL
SVVNARLRAKTLKNLSDRVVFVLWAHGFELTSMKYFVKIGPERAVSKGFFKEGSS
VELKHFFFAQDGNAAISDYDYYRYNLPTMCDIRQLLFVVEVVDKYCDGGSLYVNK
HAFHTPAGPGPGAKFVAAWTLKAAAGPGPGQYIKANSKFIGITELGPGPG (SEQ ID
NO: 28036)
TCE12 NUCLEOTIDE SEQUENCE (2970 bp)
TACGGGGACGCCGTGGTCTATAGGGGCACCACCACTTACAAACTGAATGTGGGAG
ACTATTTCGTGCTGACTAGCCACATCAAATGGGATCTGCTTAAGTACGACTTTACCG
AGGAGCGCCTGAAGCTGTTCGACCTCTGGGTGTATAAGCAGTTCGATACATACAAT
CTCTGGAATACATTCACTACATCTCGCTACTGGGAGCCTGAGTTCTACGAGGCTAT
GTACACCCCTCACAGAGACGCTGCTATGCAACGCAAGCTAGAGAAGATGGCCGAC
CAGGCAATGACCCAGATGTACAAGCAGGCTCGGAGCGAGGACAAGGCCCTGCTTG
AGGACGAGTTTACACCTTTTGATGTGGTGCGGCAGTGTAGCGGCGTGACAGTGGCA
GGCGTGTCAATTTGTAGCACCATGACCAACAGACAGTTCCACCAGAAGCTGCTGAA
AAGCATCGCAGCTACAAGGGGCGCCACCGTTGTTATTGGCACATCCAAATTCTACG
GAGGCTGGCACAATATGCTCGGCGTTAGCTTTTCAACCTTTGAGGAGGCCGCCTTG
TGTACTTTCCTTCTCAATAAGGAGATGTATTTGAAACTCAGGTCTGATAAATTCCCA
GTGCTGCACGACATAGGAAATCCTAAAGCTATCAAGTGCGTACCTACTGCTAACCC
CAAGACCCCTAAATATAAGTTCGTGAGGATCCAGCCTGGTCAGACATTTAGCGTCC
TCGCTGGTACAGGTACTAGCACCGATGTTGTCTACAGAGCCTTCGACATCTACAAT
TGCGTGAGCTTTTGTTATATGCACCACATGGAGCTCCCAACTGGAGTGCATGCCGG
CACCGACCTGTGGCCCCAGATCGCACAGTTTGCACCTTCAGCTTCCGCATTTTTCGG
AATGAGCCGCATCGGCATGGAATGTATTAATGCCAACCAGGTCATTGTCAATAACC
TCGATAAGTCTGCCGGATTCCCCTTCAATAAATGGGGAAAGGCCCGCCTGTATTAT
ATGTTCTATAAGGGGGTCATTACTCATGATGTCAGCTCCGCTATTAATAGGCCTCAG
ATCGGCGTGTTCGTCAACGAATTTTATGCTTACCTTAGGAAACACTTCAGTATGATG
ATCCTCAGCGACGATGCAACATGCCGCAGATGCCCCGCCGAAATTGTCGACACAGT
CAGCGCTCTCGTCTACGACAACAAGCTGTCCCCCAACCTCGCCTGGCCCCTCATCGT
GACCGCCCTGAGGGCCAACAGCAACAAGACTGTGGGGGAACTGGGCGACGTGAGA
GAGACCATGAGCTACTTATTTCTGTACTGTCAGGTGCACGGCAATGCCCACGTGGC
TAGCTGCGACGCCATTATGACACGGTGCCTGGCTGTGGACATGACTTACAGACGGC
TCATCTCTATGATGGGATTTAAGATGAACTACCAGGTGAATGGGTTCACACAAACA
ACAGAAACAGCCCATAGCTGTAATGTCAATCGGTTTAACGTTGCAATCACTCGCGC
CAAAGTGGGAATGAAAGATCTTTCCCCAAGGTGGTATTTCTATTACCTGGGAACCG
GCCCTACCGATGGAACGTTGATGATTGAAAGGTTTGTGTCCCTAGCCATTGATGCC
TATCCGCTGACCAAGCACCCAAATCAGGAATACGCTGACGTTTTCCACCTCTATCTC
CAGTACATCAGAAAATTGCACGATGAGCTCACCGGGCATATGCTTGACATGTATAG
CAACGTTCTGTTTAGTACAGTTTTTCCTCCCACCAGCTTCGGGCCCCTGGTGAGAAA
AATCTTTGTCGATGGCGTTCCTTTTGTGGTGAGCACGGGCTATCATTTCCGGGAATT
AGGCGTCCCTCTGCTGGAGTCCGAGCTGGTGATCGGAGCCGTGATCCTGAGAGGCC
ACAACAATTACATGCTGACCTACAACAAAGTTGAGAACATGACACCACGGGACCTT
GGAGCATGTATTGACTGCGGAACTACGTTTACTTATGCCTCTGCACTTTGGGAAATT
CAGCAGGTTGTGGATGCCGATTCTAAAATCTGGGCCCAGTGTGTGCAGCTGCACAA
TGATATTCTTCTGGCCAAGGATACAACTCCTGGGACTGGAAAGTCCCACTTTGCCA
TCGGGCTGGCCCTGTACTATCCATCAGCACGGATTGTGTATACTGCCTGCTCTCACG
CCGCAGTGGACGCCCTGTGTGAAAAGGCACTGACCATGCTCGTGAAACAGGGAGA
TGACTATGTGTATCTGCCATACCCAGACCCTTCTCGGATCTTGGGCGCTGGATGTTT
TGCAGCCTACAGTCGGTATAGAATTGGCAATTATAAGCTGAATACCGATCACAACC
TTCATAGCTCCAGGCTGTCATTTAAGGAACTGCTGGTCTACGCCGCCGACCCAGCA
ATGCACGCTGCCTCCGGCAACCTCCTCCTTGACAAGAGAACTCCTAGGACTCTGCT
CACCAAGGGCACCCTGGAGCCAGAGTACTTCAACTCTGTGTGTCGCCTTATGGTGA
AGTATCTCTACTTCATTAAGGGCCTGAACAATCTTAACCGCGGAATGGTGCTGGGC
TCCCTGGCCATTAGTATGGCCACCAATTATGATCTCTCAGTGGTGAACGCCAGACT
GAGAGCTAAGACCCTGAAGAACTTGAGCGATAGAGTGGTGTTTGTGCTGTGGGCTC
ATGGATTTGAATTGACCAGCATGAAATACTTCGTGAAGATCGGGCCAGAGAGGGC
CGTGTCTAAAGGCTTCTTCAAAGAGGGAAGCAGCGTAGAACTGAAACATTTCTTCT
TTGCTCAGGACGGAAACGCGGCTATTAGCGACTACGACTACTACAGATATAATCTG
CCCACAATGTGCGATATCCGGCAGCTCCTGTTTGTAGTGGAGGTGGTGGATAAATA
CTGTGACGGCGGATCCCTGTATGTGAATAAGCACGCCTTCCACACTCCAGCC (SEQ
ID NO: 28037)
TCE13: TCE is shown in bold (781 amino acids); MAG is lowercase and class II helper
domain and linkers in italics.
magYGDAVVYRGTTTYKLNVGDYFVLTSHKHFFFAQDGNAAISDYDYYRYNLPTW
PQIAQFAPSASAFFGMSRIGMECINANQVIVNNLDKSAGFPFNKWGKARLYYTSRY
WEPEFYEAMYTPHRDAAMQRKLEKMADQAMTQMYKQARSEDKPGTGKSHFAI
GLALYYPSARIVYTACSHAAVDALCEKALTMLVKQGDDYVYLPYPDPSRILGAGC
FGTTFTYASALWEIQQVVDADSKIFTQTTETAHSCNVNRFNVAITRAKVGMKDLS
PRWYFYYLGTGPTDGTLMIERFVSLAIDAYPLTKHPNQEYADVFHLYLQYIRKLH
DELTGHMLDMYSNVLFSTVFPPTSFGPLVRKIFVDGVPFVVSTGYHFRELGVPLLE
SELVIGAVILRGHNNYMLTYNKVENMTPRDLGACIDCSDRVVFVLWAHGFELTS
MKYFVKIGPERFVNEFYAYLRKHFSMMILSDDATCRRCPAEIVDTVSALVYDNKL
SPNLAWPLIVTALRANSNKTVGELGDVRETMSYLFLWVYKQFDTYNLWNTFTAL
LEDEFTPFDVVRQCSGVTVAGVSICSTMTNRQFHQKLLKSIAATRGATVVIGTSKF
YGGWHNMLAAYSRYRIGNYKLNTDHNLHSSRLSFKELLVYAADPAMHAASGNLL
LDKRTLYCQVHGNAHVASCDAIMTRCLAVDMTYRRLISMMGFKMNYQVNGDKF
PVLHDIGNPKAIKCVPTANPKTPKYKFVRIQPGQTFSVLAGTGTSTDVVYRAFDIY
NCDGGSLYVNKHAFHTPAGPGPGAKFVAAWTLKAAAGPGPGQYIKANSKFIGITELGPG
PG (SEQ ID NO: 28038)
TCE13 NUCLEOTIDE SEQUENCE (2343 bp)
TATGGAGATGCAGTTGTGTACAGAGGCACCACCACATACAAACTCAATGTGGGGG
ATTATTTCGTGCTGACCTCCCACAAGCACTTTTTCTTTGCACAGGACGGAAATGCCG
CTATCTCCGACTATGATTACTACCGGTACAATTTACCCACCTGGCCTCAGATTGCCC
AGTTTGCCCCAAGCGCCAGCGCCTTCTTCGGCATGAGCAGGATCGGGATGGAGTGT
ATTAATGCTAACCAAGTCATTGTGAACAATTTGGACAAGTCAGCCGGATTCCCATT
CAACAAATGGGGCAAAGCTCGGTTATATTACACATCTCGCTACTGGGAACCAGAGT
TCTATGAGGCAATGTATACTCCACATAGGGATGCTGCCATGCAGAGAAAGCTTGAG
AAGATGGCGGATCAGGCCATGACCCAGATGTATAAACAGGCCAGAAGCGAAGATA
AACCTGGCACTGGCAAGAGTCACTTCGCCATCGGACTGGCCCTCTACTACCCTAGC
GCTAGAATTGTTTATACCGCTTGTTCTCACGCAGCCGTGGATGCCCTGTGTGAGAA
GGCCCTGACTATGCTGGTGAAACAAGGGGACGATTACGTGTACCTGCCTTACCCCG
ACCCATCCAGGATCCTGGGAGCCGGCTGCTTCGGAACCACCTTCACCTATGCTTCC
GCCTTGTGGGAGATTCAGCAGGTGGTGGACGCCGACTCTAAGATTTTCACTCAGAC
CACTGAAACAGCTCACTCTTGCAACGTCAATCGCTTTAACGTTGCAATAACCAGGG
CCAAGGTAGGAATGAAGGATCTATCACCCCGGTGGTATTTTTACTATCTGGGGACA
GGCCCCACAGACGGAACACTGATGATAGAAAGATTCGTGTCCCTGGCCATTGACGC
CTACCCTCTGACTAAGCACCCTAATCAGGAATATGCTGATGTGTTCCATTTGTACCT
TCAATACATCCGGAAGCTGCACGACGAGCTGACTGGACACATGCTCGACATGTACA
GTAACGTTCTCTTCAGCACAGTCTTCCCACCCACATCTTTTGGACCTCTGGTGCGCA
AGATCTTTGTCGATGGGGTCCCTTTCGTGGTTAGCACTGGATACCACTTCCGGGAAT
TGGGGGTGCCACTGCTGGAGAGCGAGCTTGTTATCGGGGCCGTGATTCTGCGCGGA
CACAATAACTACATGCTGACTTACAATAAAGTGGAGAACATGACACCTCGGGATCT
GGGCGCATGTATCGACTGCTCAGATCGAGTGGTCTTTGTGTTATGGGCCCACGGCT
TTGAACTGACAAGCATGAAATACTTTGTGAAAATCGGGCCTGAACGGTTCGTGAAC
GAATTCTACGCATATCTGAGAAAACACTTCTCTATGATGATCCTGAGCGATGACGC
CACCTGCAGGCGGTGTCCAGCTGAGATTGTGGACACCGTGTCCGCACTGGTGTACG
ATAACAAGCTGAGTCCCAACCTAGCCTGGCCCCTGATTGTGACAGCCCTCAGGGCT
AATTCAAATAAAACTGTGGGCGAGCTCGGCGACGTGAGAGAGACCATGTCCTACCT
GTTCCTGTGGGTGTACAAGCAATTCGATACCTACAACCTGTGGAATACATTTACCG
CTCTGCTCGAGGATGAGTTCACTCCCTTTGATGTTGTGAGACAGTGTTCTGGCGTGA
CTGTGGCAGGAGTGAGCATCTGTAGCACAATGACCAATCGGCAGTTCCACCAGAA
GTTATTGAAGTCCATCGCCGCCACTAGGGGAGCCACCGTGGTGATCGGAACATCAA
AGTTTTATGGAGGCTGGCACAACATGCTTGCCGCCTACAGTAGATATCGTATTGGC
AACTATAAACTGAACACAGATCACAATCTGCACTCGAGCAGACTGTCTTTTAAGGA
GCTGCTCGTCTATGCCGCCGATCCCGCAATGCACGCCGCAAGTGGTAATCTGCTCC
TGGATAAAAGAACCCTGTACTGTCAGGTTCATGGCAACGCTCACGTGGCATCCTGT
GATGCCATCATGACTAGGTGTCTGGCCGTTGACATGACCTATAGACGCCTGATCAG
CATGATGGGATTTAAGATGAACTACCAGGTGAACGGCGACAAGTTCCCTGTCCTGC
ATGATATCGGTAACCCAAAGGCCATCAAATGTGTGCCTACCGCCAACCCCAAGACA
CCTAAGTATAAGTTTGTAAGGATCCAGCCTGGTCAAACTTTTAGTGTTTTAGCCGGG
ACCGGCACCAGTACTGATGTAGTGTATAGGGCTTTTGACATCTATAACTGTGACGG
AGGTAGCCTCTATGTGAATAAACATGCCTTTCATACACCAGCC (SEQ ID NO: 28039)
TCE14: TCE is shown in bold (598 amino acids); MAG is lowercase and class II helper
domain and linkers in italics.
magYGDAVVYRGTTTYKLNVGDYFVLTSHMKDLSPRWYFYYLGTGPTDGTLMIE
RFVSLAIDAYPLTKHPNQEYADVFHLYLQYIRKLHDELTGHMLDMYSFYAYLRK
HFSMMILSDDLWVYKQFDTYNLWNTFTMQRKLEKMADQAMTQMYKQARSEDK
PGTGKSHFAIGLALYYPSARIVYTACSHATSRYWEPEFYEAMYTPHCINANQVIVN
NLDKSAGFPFNKWGKARLYYALLEDEFTPFDVVRQCSGVTVAGVSICSTMTNRQF
HQKLLKSIAATRGATVVIGTSKFYGGWHNMLTMLVKQGDDYVYLPYPDPSRILG
AGCFAAYSRYRIGNYKLNTDHNLHSSRLSFKELLVYAADPAMHAASGNLLLDKRT
VRKIFVDGVPFVVSTGYHFRELGVPLLESELVIGAVILRGHNNYMLTYNKVENMT
PRDLGACIDCSDRVVFVLWAHGFELTSMKYFVKIGPERKHFFFAQDGNAAISDYD
YYRYNLPTWPQIAQFAPSASAFFGMSRIGMETCRRCPAEIVDTVSALVYDNKLTAN
PKTPKYKFVRIQPGQTFSVLAGTGTSTDVVYRAFDIYNCDGGSLYVNKHAFHTPA
GPGPGAKFVAAWTLKAAAGPGPGQYIKANSKFIGITELGPGPG (SEQ ID NO: 28040)
TCE14 NUCLEOTIDE SEQUENCE (1794 bp)
TACGGCGATGCCGTCGTGTATAGAGGAACAACCACCTATAAGCTTAATGTGGGAGA
TTATTTCGTGCTTACTAGTCATATGAAGGACCTGTCTCCTAGGTGGTACTTCTATTA
CCTGGGCACCGGCCCAACTGACGGCACCCTGATGATCGAGAGGTTTGTGAGCCTGG
CCATTGATGCTTATCCACTCACCAAGCACCCCAACCAGGAGTATGCCGATGTTTTCC
ACCTCTACCTGCAGTACATTAGAAAGCTCCATGATGAGTTAACAGGCCACATGCTT
GACATGTATAGCTTTTATGCCTATCTGAGAAAGCACTTTAGTATGATGATTCTGAGT
GATGACCTCTGGGTGTATAAACAGTTCGACACCTACAATCTGTGGAACACCTTCAC
TATGCAGAGAAAACTGGAGAAGATGGCCGATCAGGCTATGACTCAGATGTACAAG
CAGGCCCGGTCTGAGGACAAGCCAGGGACAGGCAAAAGCCACTTTGCAATAGGGT
TGGCCTTGTACTATCCTAGTGCCAGAATCGTGTACACCGCCTGCTCCCATGCTACCT
CAAGGTATTGGGAGCCCGAGTTCTACGAGGCAATGTATACCCCTCATTGTATCAAT
GCAAATCAGGTTATCGTAAACAATCTCGATAAGAGCGCAGGCTTCCCCTTTAACAA
ATGGGGGAAGGCTCGGCTGTACTACGCACTCCTGGAAGACGAGTTTACACCTTTTG
ACGTGGTGAGACAGTGCAGCGGGGTGACAGTTGCCGGCGTGTCTATCTGCAGCACC
ATGACTAATAGGCAGTTTCATCAGAAGCTTCTGAAATCTATCGCCGCCACCAGAGG
TGCCACTGTGGTGATCGGTACCTCTAAGTTTTACGGCGGCTGGCATAATATGCTTAC
AATGCTGGTGAAGCAGGGGGACGATTACGTGTATCTGCCTTACCCAGACCCTTCTC
GTATTCTGGGAGCTGGCTGCTTCGCTGCATATTCCAGATACCGCATTGGCAATTACA
AGCTGAACACAGATCATAATCTGCACTCTTCAAGATTGTCCTTCAAGGAACTTCTG
GTGTATGCTGCAGATCCCGCCATGCACGCTGCCTCCGGGAACCTGCTGCTGGACAA
GAGAACTGTGAGGAAGATTTTTGTCGATGGAGTGCCATTCGTGGTGTCCACTGGAT
ACCATTTCAGAGAGCTCGGCGTGCCTCTTCTGGAGTCCGAGCTGGTTATTGGCGCC
GTGATCCTTCGGGGCCACAATAACTACATGCTGACATACAATAAAGTGGAGAACAT
GACACCTCGGGACTTAGGCGCTTGTATTGACTGCAGCGACCGGGTGGTGTTTGTGC
TGTGGGCACACGGCTTCGAGCTGACCAGCATGAAATATTTTGTGAAGATCGGACCC
GAGAGGAAACATTTCTTCTTCGCCCAGGACGGCAATGCCGCCATCTCCGACTATGA
TTATTACCGGTACAACCTCCCCACCTGGCCTCAGATTGCCCAGTTCGCCCCTTCTGC
CAGCGCTTTCTTCGGCATGAGCCGGATTGGCATGGAGACATGCAGGAGATGTCCTG
CAGAAATCGTGGATACAGTGTCTGCCCTGGTCTATGATAACAAGCTCACTGCCAAC
CCAAAGACCCCCAAATACAAGTTCGTGAGGATCCAGCCCGGCCAGACATTTTCTGT
GCTGGCCGGAACTGGGACATCCACCGATGTGGTGTACCGCGCATTTGATATCTATA
ATTGTGACGGAGGCAGCCTGTATGTGAATAAGCACGCCTTCCACACACCTGCC (SEQ
ID NO: 28041)
TCE15: TCE is shown in bold (385 amino acids); MAG is lowecase and class II helper domain
and linkers in italics.
magWPQIAQFAPSASAFFGMSRIGMEDAYPLTKHPNQEYADVFHLYLQYIRKLHDE
LTGHMLDMYSFYAYLRKHFSMMILSDDPGTGKSHFAIGLALYYPSARIVYTACSH
ATSRYWEPEFYEAMYTPHCDGGSLYVNKHAFHTPANNLDKSAGFPFNKWGKART
YNKVENMTPRDLGACIVAGVSICSTMTNRQFHQKLLKSIAATRGATVVIGTSKFY
GGWHNMLTMLVKQGDDYVYLPYPDPSRILGAGCFAAYSRYRIGNYKLNTDHNLH
SSRLSFKELLVYAADPAMHAASGNLLLDKRTVRKIFVDGVPFVVSTGYHFRELGV
PLLESELVIGAVILRGHKHFFFAQDGNAAISDYDYYRYNLPTMKDLSPRWYFYYL
GTGPGPGPGAKFVAAWTLKAAAGPGPGQYIKANSKFIGITELGPGPG (SEQ ID NO: 28042)
TCE15 NUCLEOTIDE SEQUENCE (1155 bp)
TGGCCTCAGATCGCACAGTTTGCTCCTTCTGCCAGCGCCTTCTTTGGCATGTCCAGG
ATAGGAATGGAAGATGCCTATCCACTGACCAAGCACCCTAACCAGGAATATGCAG
ATGTCTTCCATCTCTACCTGCAGTACATCAGAAAACTGCATGACGAGCTGACAGGA
CACATGTTAGACATGTACTCATTTTACGCCTATCTCAGGAAACATTTTTCCATGATG
ATCCTGTCTGACGACCCCGGCACAGGAAAGAGCCATTTCGCTATTGGCCTGGCTCT
GTACTACCCCAGCGCTAGAATCGTGTACACAGCCTGCTCCCACGCCACTAGCCGGT
ATTGGGAGCCAGAGTTCTATGAGGCCATGTATACACCTCACTGCGATGGAGGAAGT
CTGTATGTTAACAAGCATGCCTTCCACACACCTGCCAATAATCTGGATAAGTCCGC
TGGATTTCCCTTTAATAAGTGGGGCAAAGCTAGAACTTACAATAAAGTGGAAAACA
TGACACCCAGGGACTTAGGCGCCTGCATCGTGGCCGGCGTGAGCATCTGCTCAACC
ATGACAAATAGACAGTTCCACCAGAAGTTGTTGAAATCTATCGCCGCAACCAGGGG
GGCCACCGTGGTGATCGGCACCTCTAAGTTTTATGGCGGCTGGCACAACATGCTGA
CCATGCTTGTGAAGCAGGGAGATGATTACGTGTACCTGCCCTACCCAGATCCTAGC
AGAATCCTGGGCGCCGGCTGCTTTGCCGCTTACTCTAGGTACAGAATCGGCAACTA
CAAGCTGAATACAGATCACAATCTCCACTCATCTAGACTGTCCTTTAAGGAGCTGC
TGGTGTACGCCGCTGATCCAGCCATGCACGCCGCCAGCGGGAATCTCCTGCTTGAT
AAAAGGACAGTGAGAAAGATCTTTGTGGATGGCGTGCCTTTCGTGGTGTCCACAGG
CTATCACTTTAGGGAGCTGGGAGTTCCTCTGCTGGAGAGCGAGCTGGTCATCGGCG
CCGTGATTCTGAGAGGCCACAAACACTTTTTCTTCGCCCAGGATGGAAATGCCGCC
ATCTCCGATTACGATTATTATAGATACAACCTGCCTACAATGAAGGACCTGAGCCC
CAGATGGTACTTCTACTACCTGGGCACCGGCCCT (SEQ ID NO: 28043)

### XIV.M. Multi-RBD Vaccine Construction

[0635] Vaccines using selected group-specific RBDs as components together with a SARS-CoV-2 Spike protein (SARS-COV2-Delta Spike-F2P) were constructed to assess immunogenicity. As shown in FIG. 25, vaccines were designed as either “blended” vaccines as a combination of four single SAM vectors, three expressing unique RBDs and the fourth expressing a whole SARS-COV2 Spike (FIG. 25; top), or as a single vector expressing a full-length SARS-COV2 Spike plus multiple RBDs (FIG. 25; bottom).

### XIV.N. Multi-RBD Expression Assessment

[0636] RBD expression was evaluated and confirmed by Western analysis using both anti-SARS-COV-2 polyclonal antibody (FIG. 26) or using an anti-His antibody (not shown). As a representative experiment, group 2 RBDs (RBDΔRBM) expressed 72h post transfection from individual SAMs is shown in FIG. 26. RBD sizes indicative of trimerized proteins (top bands) was observed when SAM transfected lysates were run under non-reducing conditions (FIG. 26; left panel) indicating that the RBDS were secreted and in the expected format consistent with trimerization (which may present the RBD in a more natural format for optimal immunogenicity, e.g., to elicit antibodies against non-linear/tertiary epitopes). RBD expression was confirmed for all RBDs and trimerization combinations.

### XIV.O. In Vivo Evaluation of SARS-COV-2 Spike and Multi-RBD Cassette Design in Naïve Mice (Blended Vaccines)

[0637] “Blended” samRNA vectors were tested at a dose of 3 μg/SAM, four SAMs per vaccine group each coding for 1 of 3 unique RBDs and the fourth SAM expressing a full-length Delta variant Spike. A delta Spike SAM alone (“Delta Spike”) and each RBD alone (data not shown) were used as control SAM vaccines were also assessed. Vaccine blends were tested where each RBD had the same T4 trimerization domain or a unique domain. Shown in FIG. 27 are anti-RBD antibody responses to vaccine matched (grey or black bars) and unmatched RBDs (color bars) measured at 4 wk post prime for Group 1 (FIG. 27A; MK/KP/KJ), Group 2 (FIG. 27B; DQ/KJ/MK), and Group 3 (FIG. 27C; GQ/JX/NC) vaccines. Vaccines with either the T4 Trimerization domain (right series) or unique domains (middle series) induced potent antibody responses to all RBDs tested, while a Delta Spike SAM only (left series) induced strong antibody responses to Delta Spike and lower cross-reactivity to SARS-1 and MK RBDs only.

[0638] Neutralizing immunity was measured using a PNA assay at 4 weeks post prime (FIG. 28; top panel) and at 4 weeks post boost (FIG. 28; bottom panel). PNA titers indicated strong responses against pseudoviruses which are directly matched to the vaccines (Delta, SARS-1, Bat-MK) and lower cross-reactivity to WIV-1 that is more closely matched to SARS-1 (sharing 94.6% amino acid identity). The Bat species RsSHC014 is more distantly related to all the vaccine delivered RBDs and Spike protein with the closest RBD, SARS-1, having only 82% identity, and failed to show a neutralizing titer above 200 (PNA background for this virus).

[0639] Priming with the same groups of SAM vectors resulted in a potent boost in neutralizing titers with fold inductions being in the order of 18-36× for the group 1 vaccine blend. Notably, the boost increased not only the magnitude of the response but also the breadth of the immune response as following the boost RsSHC014 demonstrated PNA titers above background of 7280, 12,635 and 9914 for Groups 1, 2 and 3 blended vaccines, respectively.

### XIV.P. In Vivo Evaluation of SARS-COV-2 Spike and Multi-RBD Cassette Design in Non-Naïve Mice (Blended Vaccines)

[0640] To investigate whether prior immunity to coronaviruses, either through natural infection or through vaccination, may boost the potency of a pan-sarbecovirus vaccine, blended vaccines were evaluated in mice vaccinated with either SARS-COV-2 Spike or a SARS-COV-1 (SARS-1) RBD. Groups of mice were first immunized with 3 μg of a SAM expressing cither the full-length Delta Spike or SARS-COV-1 RBD. The Delta and SARS-1 primed groups were then boosted with the group 1 vaccine blend and immunity was compared to the pre-boosted group. As shown in FIG. 29, boosting with the group 1 vaccine increased both the magnitude and breadth of the immune responses.

XIV.Q. In Vivo Evaluation of SARS-COV-2 Spike and Multi-RBD Cassette Design in Mice with Single Vaccines Homologous samRNA Prime/Boost

[0641] samRNA vectors expressing a full-length Spike and three RBDs on the same SAM backbone were evaluated and compared to a control SAM expressing full length Delta Spike. Shown in FIG. 30 is anti-Spike and RBD data at 4 weeks post prime as assessed by anti-RBD antibody titers (FIG. 30A) and a neutralizing antibody PNA assay (FIG. 30B). Each single SAM multi-Spike/RBD vaccine generated broad immunity to multiple RBDs, even those that were not matched to the respective vaccine. Antibody titers were also observed against RsSHC014 and WIV1 (FIG. 30A). PNA titers (FIG. 30B) were lower than those observed the blended vaccines and were mainly to Delta Spike and Bat MK RBD for all vaccine groups. The group 3 single vector also generated a noticeable response to SARS-1. Group 2 and 3 vectors also generated PNA titers against WIV-1. No groups generated PNA titers against RsSH.

[0642] Groups 1-3 were then boosted with Group 2 RBD vaccines. As shown in FIG. 31, PNA titers noticeably increased post boost (bottom panel) compared to post prime (top panel).

XIV.R. In Vivo Evaluation of SARS-COV-2 Spike and Multi-RBD Cassette Design in Mice with Single Vaccines Heterologous Prime/Boost

[0643] A ChAd vector expressing a full-length SARS-COV2 Spike and 3×-RBDs on the same backbone was compared to a blend of two SAM vectors: one expressing a SARS-COV-2 Spike and another expressing Group 2 3×-RBD. Vectors expressing Group 2 3×-RBDs or SARS-COV-2 were used as controls. As shown in FIG. 32 (top panel), a priming boost with the ChAd single vector expressing both the full-length Spike and the 3×-RBDs induced PNA titers against SARS-COV-2, SARS-1, Bat MK and Bat WIV-1, but not RsSH. As shown in FIG. 32 (bottom panel), boosting with the corresponding SAM vectors increased PNA titers and for the single vector titers were increased to between 1.6e3 to 1.5e4 for the different pseudoviruses assessed.

### XIV.S. In Vitro Evaluation of TCE Cassette Expression

[0644] Expression of TCEs was performed using a RT-qPCR approach using primers and a probes specific for the class II PADRE domain. TCEs were evaluated initially using ChAd vectors. Four TCEs were cloned into ChAd68 and the virus for the different TCEs were made. The virus was used to infect 293F cells and RNA was harvested and used to make cDNA. The cDNA was then evaluated for PADRE expression and levels were measured relative to a Beta-actin housekeeping gene. Shown in FIG. 33 are the relative RNA values normalized to an oncology vector. TCE12 had 81-85% expression of Slate VI and was approximately 2.4× greater than TCE13 and 8× greater than TCE14 and 15.

XIV.O. In Vivo Evaluation of Vaccines with TCE Cassettes

[0645] ChAd vectors expressing the various TCEs (TCE12, TCE13, TCE14, and TCE15) were evaluated in C57/Bl6 mice at 14 days post vaccination. Immune responses were measured against multiple SARS-COV-2 peptide pools. Overlapping (15mers over lapping by 11mers) peptide pools covering the various TCE antigen hot spots were made and evaluated by ELISpot. As shown in FIG. 34, strong T-cell responses were observed to Nsp 12 for all TCEs (top left) and to Nsp 14 for TCE12 and TCE13 only (bottom left). Lower but detectable responses were observed for Nsp13 and Nsp8 for all TCEs.

[0646] TCE12 was further assessed in a samRNA vector and compared to a ChAd-TCE12 vector. As shown in FIG. 35, strong immune responses against Nsp12 and 14 were observed for both SAM (left two series) and ChAd (right two series) vectors. Lower but detectable responses were also measured for both TCE vectors for Nsp13 and Nsp8.

### XIV.P. In Vivo Evaluation of RBD and TCE-Encoding SAM Vaccines

[0647] Single SAM vectors expressing Group 1 (“V1”), Group 2 (“V2”), or Group 3 (“V3”), antigens (SARS-COV2 Spike plus 3 sarbecovirus RBDs) were assessed following a single priming dose and compared to a SAM-SARS-COV2 vaccine only (“CoV-2 Spike”). As shown in FIG. 42 and quantified in Table 18, the vaccinations produced IgG immune responses to both vaccine component RBDs and diverse non-vaccine component RBDs. Groups 1, 2 and 3 vaccines showed comparable IgG immune responses. Notably, the breadth and overall magnitude to the non-vaccine component RBDs across multiple clades for the IgG immune response following administration of the Groups 1, 2 and 3 vaccines was increased relative the vaccine only encoding SARS-COV-2 Spike.

[0648] The Group 2 vaccine was further assessed following a homologous prime/boost strategy (boost at 4 weeks post prime dose and response assessed at week 8) and compared to a SAM-SARS-COV2 vaccine only. As shown in FIG. 43 and quantified in Table 19, the vaccinations produced IgG immune responses to both vaccine component RBDs and diverse non-vaccine component RBDs. As shown in FIG. 44 and quantified in Table 20, the vaccinations all produced neutralizing antibody titers to both vaccine component RBDs and diverse non-vaccine component RBDs. Again, the breadth and overall magnitude to the non-vaccine component RBDs across multiple clades for both the IgG immune response and neutralizing antibody titer following administration of the Group 2 vaccines was increased relative the vaccine only encoding SARS-COV-2 Spike.

[0649] These results demonstrate that vaccines encoding RBD domains were superior to the vaccine only encoding SARS-COV-2 Spike at generating immune responses against diverse non-vaccine component RBDs across multiple clades.

[0650] The Group 2 vaccine was additionally assessed administered in combination with a vector expressing the TCE12 epitope cassette (see Table 16A). The Group 2 and TCE12 vaccines were blended into a single composition and co-administered. As shown in FIG. 45 and quantified in Table 21, the vaccinations produced IgG immune responses to both vaccine component RBDs and diverse non-vaccine component RBDs. As shown in FIG. 46 and quantified in Table 22, the vaccinations all produced neutralizing antibody titers to both vaccine component RBDs and diverse non-vaccine component RBDs. Again, the breadth and overall magnitude to the non-vaccine component RBDs across multiple clades for both the IgG immune response and neutralizing antibody titer following administration of vaccines with Group 2 antigens, both alone or blended with TCE12, was increased relative the vaccine only encoding SARS-COV-2 Spike. Additionally, inclusion of TCE12 had minimal impact on the IgG response stimulated by the Group 2 vaccine. As shown in FIG. 47 and quantified in Table 23, the vaccinations with vectors encoding TCE12 all produced T cell responses to overlapping peptide pools for Nsp13. Similar results were observed for Nsp8, Nsp12, and Nsp14 (data not shown). Inclusion of RBD encoding vectors, administered either as a co-formulation or separately, had minimal impact T cell responses. These results demonstrate that combining vaccines encoding RBD domains and T cell epitopes stimulate their respective immune responses, while having minimal impact on each other.

TABLE 18
Anti-IgG Response to Spike/RBD

| | CoV-2 | GX-P2V | Ra/TG13 | Tor2 | RsSHC014 | YN2018B | WIV-1 | JL2012 | NLF2013 |
|---|---|---|---|---|---|---|---|---|---|
| SARS-CoV-2 | 1.7E+06 | 7.7E+04 | 3.1E+05 | 7.3E+04 | 7.0E+03 | 1.1E+05 | 1.2E+04 | 7.6E+03 | 1.1E+04 |
| SARS-CoV-2 | 4.0E+05 | 7.8E+04 | 1.6E+05 | 7.9E+04 | 1.7E+04 | 2.0E+05 | 2.1E+04 | 5.4E+04 | 1.1E+05 |
| Vaccine V1 | | | | | | | | | |
| SARS-CoV-2 | 8.4E+05 | 1.9E+05 | 5.9E+05 | 9.7E+04 | 4.4E+04 | 5.2E+05 | 5.4E+04 | 6.0E+04 | 9.4E+04 |
| Vaccine V2 | | | | | | | | | |
| SARS-CoV-2 | 3.4E+05 | 1.8E+05 | 3.3E+04 | 1.7E+05 | 2.2E+04 | 3.4E+05 | 3.7E+04 | 5.5E+04 | 1.7E+05 |
| Vaccine V3 | | | | | | | | | |

| | 273/2005 | YN2013 | Shx2011 | YN2011 | GX2013 | HKU3-7 | BM48-31 |
|---|---|---|---|---|---|---|---|
| SARS-CoV-2 | 9.3E+02 | 3.6E+03 | 5.1E+03 | 9.2E+02 | 1.6E+04 | 6.9E+02 | 9.1E+02 |
| SARS-CoV-2 | 1.5E+04 | 4.5E+04 | 3.0E+04 | 1.5E+04 | 3.7E+04 | 3.0E+04 | 1.8E+03 |
| Vaccine V1 | | | | | | | |
| SARS-CoV-2 | 3.1E+04 | 6.4E+04 | 4.6E+04 | 4.7E+03 | 7.3E+04 | 5.0E+04 | 3.4E+03 |
| Vaccine V2 | | | | | | | |
| SARS-CoV-2 | 9.6E+04 | 1.1E+05 | 1.1E+05 | 6.6E+04 | 1.1E+05 | 3.6E+04 | 5.5E+03 |
| Vaccine V3 | | | | | | | |

TABLE 19
8 week Anti-IgG Data

| | CoV-2 | GX-P2V | Ra/TG13 | Tor2 | RsSHC014 | YN2018B | WIV-1 | JL2012 | NF2013 |
|---|---|---|---|---|---|---|---|---|---|
| SARS-CoV-2 | 9.2E+07 | 2.6E+06 | 1.4E+06 | 5.0E+05 | 1.5E+05 | 2.5E+06 | 2.9E+05 | 1.1E+05 | 2.1E+04 |
| SARS-CoV-2 | 4.7E+07 | 8.9E+06 | 2.0E+06 | 9.7E+05 | 7.0E+05 | 1.1E+07 | 1.8E+06 | 2.1E+06 | 7.0E+05 |
| Vaccine V1 | | | | | | | | | |

| | 273/2005 | YN2013 | Shx2011 | YN2011 | GX2013 | HKU3-7 | BM48-31 |
|---|---|---|---|---|---|---|---|
| SARS-CoV-2 | 6.0E+03 | 9.6E+04 | 7.7E+04 | 1.3E+05 | 2.3E+05 | 2.7E+04 | 4.2E+03 |
| SARS-CoV-2 | 1.1E+05 | 1.5E+06 | 1.8E+06 | 1.2E+06 | 3.0E+06 | 3.4E+05 | 6.5E+04 |
| Vaccine V1 | | | | | | | |

TABLE 20
8 week PNA Data

| | CoV-2 | GX-P2V | Ra/TG13 | Tor2 | RsSHC014 | WIV-1 | YN2018B |
|---|---|---|---|---|---|---|---|
| SARS-CoV-2 | 13828 | 1520 | 10020 | 85 | 727 | 108 | 648 |
| SARS-CoV-2 | 23694 | 2335 | 5002 | 421 | 2923 | 1722 | 3797 |
| Vaccine V1 | | | | | | | |

TABLE 21
8 week IgG Data

| | CoV-2 | GX-P2V | Ra/TG13 | Tor2 | RsSHC014 | YN2018B | WIV-1 | JL2012 | NLF2013 |
|---|---|---|---|---|---|---|---|---|---|
| SARS-CoV-2 | 9.2E+07 | 2.6E+06 | 1.4E+06 | 5.0E+05 | 1.5E+03 | 2.3E+06 | 2.9E+05 | 1.1E+05 | 2.1E+04 |
| SARS-CoV-2 | 4.7E+07 | 8.9E+06 | 2.0E+06 | 9.7E+05 | 7.0E+05 | 1.1E+07 | 1.8E+06 | 2.1E+06 | 7.0E+05 |
| Vaccine V2 | | | | | | | | | |
| SARS-CoV-2 | 3.8E+07 | 2.1E+06 | 2.1E+06 | 6.8E+05 | 3.6E+05 | 4.5E+06 | 1.3E+06 | 1.0E+06 | 1.4E+05 |
| Vaccine V2 + | | | | | | | | | |
| TCE12 | | | | | | | | | |

| | 273/2005 | YN2013 | Shx2011 | YN2011 | GX2013 | HKU3-7 | BM48-31 |
|---|---|---|---|---|---|---|---|
| SARS-CoV-2 | 6.0E+03 | 9.6E+04 | 7.7E+04 | 1.3E+05 | 2.3E+05 | 2.7E+04 | 4.2E+03 |
| SARS-CoV-2 | 1.1E+05 | 1.5E+06 | 1.8E+06 | 1.2E+06 | 3.0E+06 | 3.4E+05 | 6.5E+04 |
| Vaccine V2 | | | | | | | |
| SARS-CoV-2 | 3.0E+04 | 8.0E+05 | 9.8E+05 | 9.2E+05 | 6.8E+05 | 4.9E+05 | 1.7E+05 |
| Vaccine V2 + | | | | | | | |
| TCE12 | | | | | | | |

TABLE 22
8 week PNA data

| | CoV-2 | GX-P2V | Ra/TG13 | Tor2 | RsSHC014 | WIV-1 | YN2018B |
|---|---|---|---|---|---|---|---|
| SARS-CoV-2 | 13828 | 1520 | 10020 | 85 | 727 | 108 | 648 |
| SARS-CoV-2 | 23694 | 2325 | 5002 | 421 | 2923 | 1722 | 3797 |
| V2 RBDs | | | | | | | |
| SARS-CoV-2 | 18123 | 2020 | 6603 | 343 | 1379 | 866 | 3155 |
| V2 RBDs + | | | | | | | |
| TCE12 | | | | | | | |

TABLE 23
ELISpot T-cell responses to Nsp13

| | | | Spike-D- | Spike-D- | |
|---|---|---|---|---|---|
| | Spike- | Spike-D- | 3xRBD + | 3xRBD + TCE12 | SAM- |
| | Delta | 3xRBD | TCE12 | (R + L) | TCE12 |
| | 27.2 | 28.0 | 4306.4 | 1066.9 | 2884.6 |
| | 51.0 | 33.1 | 5041.2 | 3004.6 | 1266.5 |
| | 0 | 28.2 | 2563.4 | 1750.7 | 2899.1 |
| | 21.5 | 56.6 | 1456.9 | 2243.6 | 4021.1 |
| | 60.0 | 7.6 | 2344.9 | 3428.7 | 2829.3 |
| | 38.4 | 52.2 | 2561.5 | 9300.0 | 4184.3 |
| Mean | 33.0 | 34.3 | 3045.7 | 3465.8 | 3014.2 |

### Additional Sequences

[0651] The sequences referred to below in Tables A-F refer to sequences found in International Application publication number WO2021236854A1 and U.S. Provisional Application No. 63/251,441, each of which is hereby incorporated by reference for all purposes.

### Table A

[0652] Refer to SEQ ID NOS. 130-8195 in the Sequence Listing found in International Application publication number WO2021236854A1 and U.S. Provisional Application No. 63/251,441, each of which is hereby incorporated by reference for all purposes. Presented is each candidate MHC Class I epitope encoded by SARS-COV-2 that was predicted to associate with a given HLA allele with an EDGE score >0.001. Each entry includes the candidate epitope sequence and cognate HLA alleles with a predicted EDGE score greater than 0.001, with each cognate pairing ranked as H (EDGE score >0.1), M (EDGE score between 0.01 and 0.1), and L (EDGE score <0.01). For example, the candidate epitope MESLVPGF (SEQ ID NO: 127) is predicted to pair with HLA-B*18:01, HLA-B*37:01, and HLA-B*07:05 with EDGE scores 0.019, 0.032, and 0.008, respectively. Accordingly, the entry for SEQ ID NO: 130 is “MESLVPGF: B18:01M; B37:01M; B07:05L.”

### Table B

[0653] Refer to SEQ ID NOS. 8196-26740 in the Sequence Listing found in International Application publication number WO2021236854A1 and U.S. Provisional Application No. 63/251,441, each of which is hereby incorporated by reference for all purposes. Presented is each candidate MHC Class II epitope encoded by SARS-COV-2 that was predicted to associate with a given HLA allele with an EDGE score >0.001. Each entry includes the candidate epitope sequence and cognate HLA alleles with a predicted EDGE score greater than 0.001, with each cognate pairing ranked as H (EDGE score >0.1), M (EDGE score between 0.01 and 0.1), and L (EDGE score <0.01). For example, the candidate epitope VELVAELEGI (SEQ ID NO: 128) is predicted to pair with HLA-DQA1*03:02-B1*03:03, HLA-DRB1*11:02, HLA-DQA1*05:05-B1*03:19, and HLA-DPA1*01:03-B1*104:01 with EDGE scores 0.003145, 0.00328, 0.041097, and 0.011613, respectively. Accordingly, the entry for SEQ ID NO: 8219 is “VELVAELEGI: DQA1*03:02-B1*03:03L; DRB1*11:02L; DQA1*05:05-B1*03:19M; DPA1*01:03-B1*104:01M.” Only HLA-DQ and HLA-DP are referred to by their alpha and beta chains. HLA-DR is referred to only by its beta chain as the alpha chain is generally invariable in the human population, with HLA-DR peptide contact regions particularly invariant.

### Table C

[0654] Refer to SEQ ID NOS. 26741-27179 in the Sequence Listing found in International Application publication number WO2021236854A1 and U.S. Provisional Application No. 63/251,441, each of which is hereby incorporated by reference for all purposes. Presented are additional MHC Class I epitopes, other than those from the Spike protein, encoded within the optimized cassette that were predicted to associate with a given HLA allele with an EDGE score >0.001. The additional epitopes were determined by calculating population coverage criteria P with all initial epitopes provided by the SARS-COV-2 Spike protein (SEQ ID NO:59) split into S1 and S2 and applying the optimization algorithms described herein.

### Table D

[0655] Refer to SEQ ID NOS. 27180-27495 in the Sequence Listing found in International Application publication number WO2021236854A1 and U.S. Provisional Application No. 63/251,441, each of which is hereby incorporated by reference for all purposes, for SARS-COV-2 Spike overlapping peptide pools. Each entry includes the stimulatory peptide, SARS-COV-2 protein source, peptide subpool information, and Table. For example, the stimulatory peptide MFVFLVLLPLVSSQC (SEQ ID NO: 27180) is derived from SARS-COV-2 Spike protein (Wuhan D614G variant), included in subpool S_Wu_1_2, and found in Table D. Accordingly, the entry for SEQ ID NO. 27180 is “MFVFLVLLPLVSSQC(SEQ ID NO:27180): Spike Wuhan D614G; S_Wu_1 2; Table D”.

### Table E

[0656] Refer to SEQ ID NOS. 27496-27603 in the Sequence Listing found in International Application publication number WO2021236854A1 and U.S. Provisional Application No. 63/251,441, each of which is hereby incorporated by reference for all purposes, for TCE5-encoded overlapping peptide pools. Each entry includes the stimulatory peptide, SARS-COV-2 protein source, peptide subpool information, and Table. For example, the stimulatory peptide LLWPVTLACFVLAAV (SEQ ID NO: 27496) is derived from SARS-COV-2 Membrane protein, included in subpool OLP_Mem, and found in Table E. Accordingly, the entry for SEQ ID NO. 27496 is “LLWPVTLACFVLAAV(SEQ ID NO:27496): Membrane; OLP_Mem; Table E”

### Table F

[0657] Refer to SEQ ID NOS. 27604-27939 in the Sequence Listing found in International Application publication number WO2021236854A1 and U.S. Provisional Application No. 63/251,441, each of which is hereby incorporated by reference for all purposes, for TCE5-encoded minimal epitope peptide pools. Each entry includes the stimulatory peptide, SARS-CoV-2 protein source, peptide subpool information, and Table. For example, the stimulatory peptide ALSKGVHFV (SEQ ID NO: 27604) is derived from SARS-COV-2 ORF3a protein (frame 52-85), included in subpool Min_validated, and found in Table F. Accordingly, the entry for SEQ ID NO. 27604 is “ALSKGVHFV(SEQ ID NO:27604): ORF3a 52-85; Min_validated; Table F”.

[0658] Certain additional sequences for vectors, cassettes, and antibodies referred to herein are described below and referred to by SEQ ID NO.

Tremelimumab VL (SEQ ID NO: 16)
Tremelimumab VH (SEQ ID NO: 17)
Tremelimumab VH CDR1 (SEQ ID NO: 18)
Tremelimumab VH CDR2 (SEQ ID NO: 19)
Tremelimumab VH CDR3 (SEQ ID NO: 20)
Tremelimumab VL CDR1 (SEQ ID NO: 21)
Tremelimumab VL CDR2 (SEQ ID NO: 22)
Tremelimumab VL CDR3 (SEQ ID NO: 23)
Durvalumab (MEDI4736) VL (SEQ ID NO: 24)
MEDI4736 VH (SEQ ID NO: 25)
MEDI4736 VH CDR1 (SEQ ID NO: 26)
MEDI4736 VH CDR2 (SEQ ID NO: 27)
MEDI4736 VH CDR3 (SEQ ID NO: 28)
MEDI4736 VL CDR1 (SEQ ID NO: 29)
MEDI4736 VL CDR2 (SEQ ID NO: 30)
MEDI4736 VL CDR3 (SEQ ID NO: 31)
UbA76-25merPDTT nucleotide (SEQ ID NO: 32)
UbA76-25merPDTT polypeptide (SEQ ID NO: 33)
MAG-25merPDTT nucleotide (SEQ ID NO: 34)
MAG-25merPDTT polypeptide (SEQ ID NO: 35)
Ub7625merPDTT_NoSFL nucleotide (SEQ ID NO: 36)
Ub7625merPDTT_NoSFL polypeptide (SEQ ID NO: 37)
ChAdV68.5WTnt.MAG25mer (SEQ ID NO: 2); AC_000011.1 with E1 (nt 577 to 3403) and E3 (nt 27,125-31,825)
sequences deleted; corresponding ATCC VR-594 nucleotides substituted at five positions; model neo-
antigen cassette under the control of the CMV promoter/enhancer inserted in place of deleted E1; SV40
polyA 3′ of cassette
Venezuelan equine encephalitis virus [VEE (SEQ ID NO: 3) GenBank: L01442.2
VEE-MAG25mer (SEQ ID NO: 4); contains MAG-25merPDTT nucleotide (bases 30-1755)
Venezuelan equine encephalitis virus strain TC-83 [TC-83(SEQ ID NO: 5) GenBank: L01443.1
ATAGGCGGCGCATGAGAGAAGCCCAGACCAATTACCTACCCAAAATGGAGAAAGTTCACGTTGAC
ATCGAGGAAGACAGCCCATTCCTCAGAGCTTTGCAGCGGAGCTTCCCGCAGTTTGAGGTAGAAGCC
AAGCAGGTCACTGATAATGACCATGCTAATGCCAGAGCGTTTTCGCATCTGGCTTCAAAACTGATC
GAAACGGAGGTGGACCCATCCGACACGATCCTTGACATTGGAAGTGCGCCCGCCCGCAGAATGTA
TTCTAAGCACAAGTATCATTGTATCTGTCCGATGAGATGTGCGGAAGATCCGGACAGATTGTATAA
GTATGCAACTAAGCTGAAGAAAAACTGTAAGGAAATAACTGATAAGGAATTGGACAAGAAAATG
AAGGAGCTCGCCGCCGTCATGAGCGACCCTGACCTGGAAACTGAGACTATGTGCCTCCACGACGA
CGAGTCGTGTCGCTACGAAGGGCAAGTCGCTGTTTACCAGGATGTATACGCGGTTGACGGACCGAC
AAGTCTCTATCACCAAGCCAATAAGGGAGTTAGAGTCGCCTACTGGATAGGCTTTGACACCACCCC
TTTTATGTTTAAGAACTTGGCTGGAGCATATCCATCATACTCTACCAACTGGGCCGACGAAACCGT
GTTAACGGCTCGTAACATAGGCCTATGCAGCTCTGACGTTATGGAGCGGTCACGTAGAGGGATGTC
CATTCTTAGAAAGAAGTATTTGAAACCATCCAACAATGTTCTATTCTCTGTTGGCTCGACCATCTAC
CACGAGAAGAGGGACTTACTGAGGAGCTGGCACCTGCCGTCTGTATTTCACTTACGTGGCAAGCAA
AATTACACATGTCGGTGTGAGACTATAGTTAGTTGCGACGGGTACGTCGTTAAAAGAATAGCTATC
AGTCCAGGCCTGTATGGGAAGCCTTCAGGCTATGCTGCTACGATGCACCGCGAGGGATTCTTGTGC
TGCAAAGTGACAGACACATTGAACGGGGAGAGGGTCTCTTTTCCCGTGTGCACGTATGTGCCAGCT
ACATTGTGTGACCAAATGACTGGCATACTGGCAACAGATGTCAGTGCGGACGACGCGCAAAAACT
GCTGGTTGGGCTCAACCAGCGTATAGTCGTCAACGGTCGCACCCAGAGAAACACCAATACCATGA
AAAATTACCTTTTGCCCGTAGTGGCCCAGGCATTTGCTAGGTGGGCAAAGGAATATAAGGAAGATC
AAGAAGATGAAAGGCCACTAGGACTACGAGATAGACAGTTAGTCATGGGGTGTTGTTGGGCTTTT
AGAAGGCACAAGATAACATCTATTTATAAGCGCCCGGATACCCAAACCATCATCAAAGTGAACAG
CGATTTCCACTCATTCGTGCTGCCCAGGATAGGCAGTAACACATTGGAGATCGGGCTGAGAACAAG
AATCAGGAAAATGTTAGAGGAGCACAAGGAGCCGTCACCTCTCATTACCGCCGAGGACGTACAAG
AAGCTAAGTGCGCAGCCGATGAGGCTAAGGAGGTGCGTGAAGCCGAGGAGTTGCGCGCAGCTCTA
CCACCTTTGGCAGCTGATGTTGAGGAGCCCACTCTGGAAGCCGATGTCGACTTGATGTTACAAGAG
GCTGGGGCCGGCTCAGTGGAGACACCTCGTGGCTTGATAAAGGTTACCAGCTACGATGGCGAGGA
CAAGATCGGCTCTTACGCTGTGCTTTCTCCGCAGGCTGTACTCAAGAGTGAAAAATTATCTTGCATC
CACCCTCTCGCTGAACAAGTCATAGTGATAACACACTCTGGCCGAAAAGGGCGTTATGCCGTGGAA
CCATACCATGGTAAAGTAGTGGTGCCAGAGGGACATGCAATACCCGTCCAGGACTTTCAAGCTCTG
AGTGAAAGTGCCACCATTGTGTACAACGAACGTGAGTTCGTAAACAGGTACCTGCACCATATTGCC
ACACATGGAGGAGCGCTGAACACTGATGAAGAATATTACAAAACTGTCAAGCCCAGCGAGCACGA
CGGCGAATACCTGTACGACATCGACAGGAAACAGTGCGTCAAGAAAGAACTAGTCACTGGGCTAG
GGCTCACAGGCGAGCTGGTGGATCCTCCCTTCCATGAATTCGCCTACGAGAGTCTGAGAACACGAC
CAGCCGCTCCTTACCAAGTACCAACCATAGGGGTGTATGGCGTGCCAGGATCAGGCAAGTCTGGC
ATCATTAAAAGCGCAGTCACCAAAAAAGATCTAGTGGTGAGCGCCAAGAAAGAAAACTGTGCAGA
AATTATAAGGGACGTCAAGAAAATGAAAGGGCTGGACGTCAATGCCAGAACTGTGGACTCAGTGC
TCTTGAATGGATGCAAACACCCCGTAGAGACCCTGTATATTGACGAAGCTTTTGCTTGTCATGCAG
GTACTCTCAGAGCGCTCATAGCCATTATAAGACCTAAAAAGGCAGTGCTCTGCGGGGATCCCAAAC
AGTGCGGTTTTTTTAACATGATGTGCCTGAAAGTGCATTTTAACCACGAGATTTGCACACAAGTCTT
CCACAAAAGCATCTCTCGCCGTTGCACTAAATCTGTGACTTCGGTCGTCTCAACCTTGTTTTACGAC
AAAAAAATGAGAACGACGAATCCGAAAGAGACTAAGATTGTGATTGACACTACCGGCAGTACCAA
ACCTAAGCAGGACGATCTCATTCTCACTTGTTTCAGAGGGTGGGTGAAGCAGTTGCAAATAGATTA
CAAAGGCAACGAAATAATGACGGCAGCTGCCTCTCAAGGGCTGACCCGTAAAGGTGTGTATGCCG
TTCGGTACAAGGTGAATGAAAATCCTCTGTACGCACCCACCTCAGAACATGTGAACGTCCTACTGA
CCCGCACGGAGGACCGCATCGTGTGGAAAACACTAGCCGGCGACCCATGGATAAAAACACTGACT
GCCAAGTACCCTGGGAATTTCACTGCCACGATAGAGGAGTGGCAAGCAGAGCATGATGCCATCAT
GAGGCACATCTTGGAGAGACCGGACCCTACCGACGTCTTCCAGAATAAGGCAAACGTGTGTTGGG
CCAAGGCTTTAGTGCCGGTGCTGAAGACCGCTGGCATAGACATGACCACTGAACAATGGAACACT
GTGGATTATTTTGAAACGGACAAAGCTCACTCAGCAGAGATAGTATTGAACCAACTATGCGTGAG
GTTCTTTGGACTCGATCTGGACTCCGGTCTATTTTCTGCACCCACTGTTCCGTTATCCATTAGGAAT
AATCACTGGGATAACTCCCCGTCGCCTAACATGTACGGGCTGAATAAAGAAGTGGTCCGTCAGCTC
TCTCGCAGGTACCCACAACTGCCTCGGGCAGTTGCCACTGGAAGAGTCTATGACATGAACACTGGT
ACACTGCGCAATTATGATCCGCGCATAAACCTAGTACCTGTAAACAGAAGACTGCCTCATGCTTTA
GTCCTCCACCATAATGAACACCCACAGAGTGACTTTTCTTCATTCGTCAGCAAATTGAAGGGCAGA
ACTGTCCTGGTGGTCGGGGAAAAGTTGTCCGTCCCAGGCAAAATGGTTGACTGGTTGTCAGACCGG
CCTGAGGCTACCTTCAGAGCTCGGCTGGATTTAGGCATCCCAGGTGATGTGCCCAAATATGACATA
ATATTTGTTAATGTGAGGACCCCATATAAATACCATCACTATCAGCAGTGTGAAGACCATGCCATT
AAGCTTAGCATGTTGACCAAGAAAGCTTGTCTGCATCTGAATCCCGGCGGAACCTGTGTCAGCATA
GGTTATGGTTACGCTGACAGGGCCAGCGAAAGCATCATTGGTGCTATAGCGCGGCAGTTCAAGTTT
TCCCGGGTATGCAAACCGAAATCCTCACTTGAAGAGACGGAAGTTCTGTTTGTATTCATTGGGTAC
GATCGCAAGGCCCGTACGCACAATCCTTACAAGCTTTCATCAACCTTGACCAACATTTATACAGGT
TCCAGACTCCACGAAGCCGGATGTGCACCCTCATATCATGTGGTGCGAGGGGATATTGCCACGGCC
ACCGAAGGAGTGATTATAAATGCTGCTAACAGCAAAGGACAACCTGGCGGAGGGGTGTGCGGAGC
GCTGTATAAGAAATTCCCGGAAAGCTTCGATTTACAGCCGATCGAAGTAGGAAAAGCGCGACTGG
TCAAAGGTGCAGCTAAACATATCATTCATGCCGTAGGACCAAACTTCAACAAAGTTTCGGAGGTTG
AAGGTGACAAACAGTTGGCAGAGGCTTATGAGTCCATCGCTAAGATTGTCAACGATAACAATTAC
AAGTCAGTAGCGATTCCACTGTTGTCCACCGGCATCTTTTCCGGGAACAAAGATCGACTAACCCAA
TCATTGAACCATTTGCTGACAGCTTTAGACACCACTGATGCAGATGTAGCCATATACTGCAGGGAC
AAGAAATGGGAAATGACTCTCAAGGAAGCAGTGGCTAGGAGAGAAGCAGTGGAGGAGATATGCA
TATCCGACGACTCTTCAGTGACAGAACCTGATGCAGAGCTGGTGAGGGTGCATCCGAAGAGTTCTT
TGGCTGGAAGGAAGGGCTACAGCACAAGCGATGGCAAAACTTTCTCATATTTGGAAGGGACCAAG
TTTCACCAGGCGGCCAAGGATATAGCAGAAATTAATGCCATGTGGCCCGTTGCAACGGAGGCCAA
TGAGCAGGTATGCATGTATATCCTCGGAGAAAGCATGAGCAGTATTAGGTCGAAATGCCCCGTCG
AAGAGTCGGAAGCCTCCACACCACCTAGCACGCTGCCTTGCTTGTGCATCCATGCCATGACTCCAG
AAAGAGTACAGCGCCTAAAAGCCTCACGTCCAGAACAAATTACTGTGTGCTCATCCTTTCCATTGC
CGAAGTATAGAATCACTGGTGTGCAGAAGATCCAATGCTCCCAGCCTATATTGTTCTCACCGAAAG
TGCCTGCGTATATTCATCCAAGGAAGTATCTCGTGGAAACACCACCGGTAGACGAGACTCCGGAGC
CATCGGCAGAGAACCAATCCACAGAGGGGACACCTGAACAACCACCACTTATAACCGAGGATGAG
ACCAGGACTAGAACGCCTGAGCCGATCATCATCGAAGAGGAAGAAGAGGATAGCATAAGTTTGCT
GTCAGATGGCCCGACCCACCAGGTGCTGCAAGTCGAGGCAGACATTCACGGGCCGCCCTCTGTATC
TAGCTCATCCTGGTCCATTCCTCATGCATCCGACTTTGATGTGGACAGTTTATCCATACTTGACACC
CTGGAGGGAGCTAGCGTGACCAGCGGGGCAACGTCAGCCGAGACTAACTCTTACTTCGCAAAGAG
TATGGAGTTTCTGGCGCGACCGGTGCCTGCGCCTCGAACAGTATTCAGGAACCCTCCACATCCCGC
TCCGCGCACAAGAACACCGTCACTTGCACCCAGCAGGGCCTGCTCGAGAACCAGCCTAGTTTCCAC
CCCGCCAGGCGTGAATAGGGTGATCACTAGAGAGGAGCTCGAGGCGCTTACCCCGTCACGCACTC
CTAGCAGGTCGGTCTCGAGAACCAGCCTGGTCTCCAACCCGCCAGGCGTAAATAGGGTGATTACA
AGAGAGGAGTTTGAGGCGTTCGTAGCACAACAACAATGACGGTTTGATGCGGGTGCATACATCTTT
TCCTCCGACACCGGTCAAGGGCATTTACAACAAAAATCAGTAAGGCAAACGGTGCTATCCGAAGT
GGTGTTGGAGAGGACCGAATTGGAGATTTCGTATGCCCCGCGCCTCGACCAAGAAAAAGAAGAAT
TACTACGCAAGAAATTACAGTTAAATCCCACACCTGCTAACAGAAGCAGATACCAGTCCAGGAAG
GTGGAGAACATGAAAGCCATAACAGCTAGACGTATTCTGCAAGGCCTAGGGCATTATTTGAAGGC
AGAAGGAAAAGTGGAGTGCTACCGAACCCTGCATCCTGTTCCTTTGTATTCATCTAGTGTGAACCG
TGCCTTTTCAAGCCCCAAGGTCGCAGTGGAAGCCTGTAACGCCATGTTGAAAGAGAACTTTCCGAC
TGTGGCTTCTTACTGTATTATTCCAGAGTACGATGCCTATTTGGACATGGTTGACGGAGCTTCATGC
TGCTTAGACACTGCCAGTTTTTGCCCTGCAAAGCTGCGCAGCTTTCCAAAGAAACACTCCTATTTGG
AACCCACAATACGATCGGCAGTGCCTTCAGCGATCCAGAACACGCTCCAGAACGTCCTGGCAGCT
GCCACAAAAAGAAATTGCAATGTCACGCAAATGAGAGAATTGCCCGTATTGGATTCGGCGGCCTTT
AATGTGGAATGCTTCAAGAAATATGCGTGTAATAATGAATATTGGGAAACGTTTAAAGAAAACCC
CATCAGGCTTACTGAAGAAAACGTGGTAAATTACATTACCAAATTAAAAGGACCAAAAGCTGCTG
CTCTTTTTGCGAAGACACATAATTTGAATATGTTGCAGGACATACCAATGGACAGGTTTGTAATGG
ACTTAAAGAGAGACGTGAAAGTGACTCCAGGAACAAAACATACTGAAGAACGGCCCAAGGTACA
GGTGATCCAGGCTGCCGATCCGCTAGCAACAGCGTATCTGTGCGGAATCCACCGAGAGCTGGTTAG
GAGATTAAATGCGGTCCTGCTTCCGAACATTCATACACTGTTTGATATGTCGGCTGAAGACTTTGA
CGCTATTATAGCCGAGCACTTCCAGCCTGGGGATTGTGTTCTGGAAACTGACATCGCGTCGTTTGA
TAAAAGTGAGGACGACGCCATGGCTCTGACCGCGTTAATGATTCTGGAAGACTTAGGTGTGGACG
CAGAGCTGTTGACGCTGATTGAGGCGGCTTTCGGCGAAATTTCATCAATACATTTGCCCACTAAAA
CTAAATTTAAATTCGGAGCCATGATGAAATCTGGAATGTTCCTCACACTGTTTGTGAACACAGTCA
TTAACATTGTAATCGCAAGCAGAGTGTTGAGAGAACGGCTAACCGGATCACCATGTGCAGCATTCA
TTGGAGATGACAATATCGTGAAAGGAGTCAAATCGGACAAATTAATGGCAGACAGGTGCGCCACC
TGGTTGAATATGGAAGTCAAGATTATAGATGCTGTGGTGGGCGAGAAAGCGCCTTATTTCTGTGGA
GGGTTTATTTTGTGTGACTCCGTGACCGGCACAGCGTGCCGTGTGGCAGACCCCCTAAAAAGGCTG
TTTAAGCTTGGCAAACCTCTGGCAGCAGACGATGAACATGATGATGACAGGAGAAGGGCATTGCA
TGAAGAGTCAACACGCTGGAACCGAGTGGGTATTCTTTCAGAGCTGTGCAAGGCAGTAGAATCAA
GGTATGAAACCGTAGGAACTTCCATCATAGTTATGGCCATGACTACTCTAGCTAGCAGTGTTAAAT
CATTCAGCTACCTGAGAGGGGCCCCTATAACTCTCTACGGCTAACCTGAATGGACTACGACATAGT
CTAGTCCGCCAAGATGTTCCCGTTCCAGCCAATGTATCCGATGCAGCCAATGCCCTATCGCAACCC
GTTCGCGGCCCCGCGCAGGCCCTGGTTCCCCAGAACCGACCCTTTTCTGGCGATGCAGGTGCAGGA
ATTAACCCGCTCGATGGCTAACCTGACGTTCAAGCAACGCCGGGACGCGCCACCTGAGGGGCCAT
CCGCTAAGAAACCGAAGAAGGAGGCCTCGCAAAAACAGAAAGGGGGAGGCCAAGGGAAGAAGA
AGAAGAACCAAGGGAAGAAGAAGGCTAAGACAGGGCCGCCTAATCCGAAGGCACAGAATGGAAA
CAAGAAGAAGACCAACAAGAAACCAGGCAAGAGACAGCGCATGGTCATGAAATTGGAATCTGAC
AAGACGTTCCCAATCATGTTGGAAGGGAAGATAAACGGCTACGCTTGTGTGGTCGGAGGGAAGTT
ATTCAGGCCGATGCATGTGGAAGGCAAGATCGACAACGACGTTCTGGCCGCGCTTAAGACGAAGA
AAGCATCCAAATACGATCTTGAGTATGCAGATGTGCCACAGAACATGCGGGCCGATACATTCAAA
TACACCCATGAGAAACCCCAAGGCTATTACAGCTGGCATCATGGAGCAGTCCAATATGAAAATGG
GCGTTTCACGGTGCCGAAAGGAGTTGGGGCCAAGGGAGACAGCGGACGACCCATTCTGGATAACC
AGGGACGGGTGGTCGCTATTGTGCTGGGAGGTGTGAATGAAGGATCTAGGACAGCCCTTTCAGTC
GTCATGTGGAACGAGAAGGGAGTTACCGTGAAGTATACTCCGGAGAACTGCGAGCAATGGTCACT
AGTGACCACCATGTGTCTGCTCGCCAATGTGACGTTCCCATGTGCTCAACCACCAATTTGCTACGA
CAGAAAACCAGCAGAGACTTTGGCCATGCTCAGCGTTAACGTTGACAACCCGGGCTACGATGAGC
TGCTGGAAGCAGCTGTTAAGTGCCCCGGAAGGAAAAGGAGATCCACCGAGGAGCTGTTTAATGAG
TATAAGCTAACGCGCCCTTACATGGCCAGATGCATCAGATGTGCAGTTGGGAGCTGCCATAGTCCA
ATAGCAATCGAGGCAGTAAAGAGCGACGGGCACGACGGTTATGTTAGACTTCAGACTTCCTCGCA
GTATGGCCTGGATTCCTCCGGCAACTTAAAGGGCAGGACCATGCGGTATGACATGCACGGGACCA
TTAAAGAGATACCACTACATCAAGTGTCACTCTATACATCTCGCCCGTGTCACATTGTGGATGGGC
ACGGTTATTTCCTGCTTGCCAGGTGCCCGGCAGGGGACTCCATCACCATGGAATTTAAGAAAGATT
CCGTCAGACACTCCTGCTCGGTGCCGTATGAAGTGAAATTTAATCCTGTAGGCAGAGAACTCTATA
CTCATCCCCCAGAACACGGAGTAGAGCAAGCGTGCCAAGTCTACGCACATGATGCACAGAACAGA
GGAGCTTATGTCGAGATGCACCTCCCGGGCTCAGAAGTGGACAGCAGTTTGGTTTCCTTGAGCGGC
AGTTCAGTCACCGTGACACCTCCTGATGGGACTAGCGCCCTGGTGGAATGCGAGTGTGGCGGCACA
AAGATCTCCGAGACCATCAACAAGACAAAACAGTTCAGCCAGTGCACAAAGAAGGAGCAGTGCA
GAGCATATCGGCTGCAGAACGATAAGTGGGTGTATAATTCTGACAAACTGCCCAAAGCAGCGGGA
GCCACCTTAAAAGGAAAACTGCATGTCCCATTCTTGCTGGCAGACGGCAAATGCACCGTGCCTCTA
GCACCAGAACCTATGATAACCTTCGGTTTCAGATCAGTGTCACTGAAACTGCACCCTAAGAATCCC
ACATATCTAATCACCCGCCAACTTGCTGATGAGCCTCACTACACGCACGAGCTCATATCTGAACCA
GCTGTTAGGAATTTTACCGTCACCGAAAAAGGGTGGGAGTTTGTATGGGGAAACCACCCGCCGAA
AAGGTTTTGGGCACAGGAAACAGCACCCGGAAATCCACATGGGCTACCGCACGAGGTGATAACTC
ATTATTACCACAGATACCCTATGTCCACCATCCTGGGTTTGTCAATTTGTGCCGCCATTGCAACCGT
TTCCGTTGCAGCGTCTACCTGGCTGTTTTGCAGATCTAGAGTTGCGTGCCTAACTCCTTACCGGCTA
ACACCTAACGCTAGGATACCATTTTGTCTGGCTGTGCTTTGCTGCGCCCGCACTGCCCGGGCCGAG
ACCACCTGGGAGTCCTTGGATCACCTATGGAACAATAACCAACAGATGTTCTGGATTCAATTGCTG
ATCCCTCTGGCCGCCTTGATCGTAGTGACTCGCCTGCTCAGGTGCGTGTGCTGTGTCGTGCCTTTTT
TAGTCATGGCCGGCGCCGCAGGCGCCGGCGCCTACGAGCACGCGACCACGATGCCGAGCCAAGCG
GGAATCTCGTATAACACTATAGTCAACAGAGCAGGCTACGCACCACTCCCTATCAGCATAACACCA
ACAAAGATCAAGCTGATACCTACAGTGAACTTGGAGTACGTCACCTGCCACTACAAAACAGGAAT
GGATTCACCAGCCATCAAATGCTGCGGATCTCAGGAATGCACTCCAACTTACAGGCCTGATGAACA
GTGCAAAGTCTTCACAGGGGTTTACCCGTTCATGTGGGGTGGTGCATATTGCTTTTGCGACACTGA
GAACACCCAAGTCAGCAAGGCCTACGTAATGAAATCTGACGACTGCCTTGCGGATCATGCTGAAG
CATATAAAGCGCACACAGCCTCAGTGCAGGCGTTCCTCAACATCACAGTGGGAGAACACTCTATTG
TGACTACCGTGTATGTGAATGGAGAAACTCCTGTGAATTTCAATGGGGTCAAAATAACTGCAGGTC
CGCTTTCCACAGCTTGGACACCCTTTGATCGCAAAATCGTGCAGTATGCCGGGGAGATCTATAATT
ATGATTTTCCTGAGTATGGGGCAGGACAACCAGGAGCATTTGGAGATATACAATCCAGAACAGTCT
CAAGCTCTGATCTGTATGCCAATACCAACCTAGTGCTGCAGAGACCCAAAGCAGGAGCGATCCAC
GTGCCATACACTCAGGCACCTTCGGGTTTTGAGCAATGGAAGAAAGATAAAGCTCCATCATTGAAA
TTTACCGCCCCTTTCGGATGCGAAATATATACAAACCCCATTCGCGCCGAAAACTGTGCTGTAGGG
TCAATTCCATTAGCCTTTGACATTCCCGACGCCTTGTTCACCAGGGTGTCAGAAACACCGACACTTT
CAGCGGCCGAATGCACTCTTAACGAGTGCGTGTATTCTTCCGACTTTGGTGGGATCGCCACGGTCA
AGTACTCGGCCAGCAAGTCAGGCAAGTGCGCAGTCCATGTGCCATCAGGGACTGCTACCCTAAAA
GAAGCAGCAGTCGAGCTAACCGAGCAAGGGTCGGCGACTATCCATTTCTCGACCGCAAATATCCA
CCCGGAGTTCAGGCTCCAAATATGCACATCATATGTTACGTGCAAAGGTGATTGTCACCCCCCGAA
AGACCATATTGTGACACACCCTCAGTATCACGCCCAAACATTTACAGCCGCGGTGTCAAAAACCGC
GTGGACGTGGTTAACATCCCTGCTGGGAGGATCAGCCGTAATTATTATAATTGGCTTGGTGCTGGC
TACTATTGTGGCCATGTACGTGCTGACCAACCAGAAACATAATTGAATACAGCAGCAATTGGCAAG
CTGCTTACATAGAACTCGCGGCGATTGGCATGCCGCCTTAAAATTTTTATTTTATTTTTCTTTTCTTT
TCCGAATCGGATTTTGTTTTTAATATTTC
VEE Delivery Vector (SEQ ID NO: 6); VEE genome with nucleotides 7544-11175 deleted [alphavirus
structural proteins removed
ATGggcggcgcatgagagaagcccagaccaattacctacccaaaATGGagaaagttcacgttgacatcgaggaagacagccc
attcctcagagctttgcagcggagcttcccgcagtttgaggtagaagccaagcaggtcactgataatgaccatgctaatgccagagcgt
tttcgcatctggcttcaaaactgatcgaaacggaggtggacccatccgacacgatccttgacattggaagtgcgcccgcccgcagaat
gtattctaagcacaagtatcattgtatctgtccgatgagatgtgcggaagatccggacagattgtataagtatgcaactaagctgaagaaa
aactgtaaggaaataactgataaggaattggacaagaaaatgaaggagctcgccgccgtcatgagcgaccctgacctggaaactgag
actatgtgcctccacgacgacgagtcgtgtcgctacgaagggcaagtcgctgtttaccaggatgtatacgcggttgacggaccgacaa
gtctctatcaccaagccaataagggagttagagtcgcctactggataggctttgacaccaccccttttatgtttaagaacttggctggagc
atatccatcatactctaccaactgggccgacgaaaccgtgttaacggctcgtaacataggcctatgcagctctgacgttatggagcggtc
acgtagagggatgtccattcttagaaagaagtatttgaaaccatccaacaatgttctattctctgttggctcgaccatctaccacgagaaga
gggacttactgaggagctggcacctgccgtctgtatttcacttacgtggcaagcaaaattacacatgtcggtgtgagactatagttagttg
cgacgggtacgtcgttaaaagaatagctatcagtccaggcctgtatgggaagccttcaggctatgctgctacgatgcaccgcgaggga
ttcttgtgctgcaaagtgacagacacattgaacggggagagggtctcttttcccgtgtgcacgtatgtgccagctacattgtgtgaccaaa
tgactggcatactggcaacagatgtcagtgcggacgacgcgcaaaaactgctggttgggctcaaccagcgtatagtcgtcaacggtc
gcacccagagaaacaccaataccatgaaaaattaccttttgcccgtagtggcccaggcatttgctaggtgggcaaaggaatataagga
agatcaagaagatgaaaggccactaggactacgagatagacagttagtcatggggtgttgttgggcttttagaaggcacaagataacat
ctatttataagcgcccggatacccaaaccatcatcaaagtgaacagcgatttccactcattcgtgctgcccaggataggcagtaacacat
tggagatcgggctgagaacaagaatcaggaaaatgttagaggagcacaaggagccgtcacctctcattaccgccgaggacgtacaa
gaagctaagtgcgcagccgatgaggctaaggaggtgcgtgaagccgaggagttgcgcgcagctctaccacctttggcagctgatgtt
gaggagcccactctggaagccgatgtcgacttgatgttacaagaggctggggccggctcagtggagacacctcgtggcttgataaag
gttaccagctacgctggcgaggacaagatcggctcttacgctgtgctttctccgcaggctgtactcaagagtgaaaaattatcttgcatcc
accctctcgctgaacaagtcatagtgataacacactctggccgaaaagggcgttatgccgtggaaccataccatggtaaagtagtggtg
ccagagggacatgcaatacccgtccaggactttcaagctctgagtgaaagtgccaccattgtgtacaacgaacgtgagttcgtaaaca
ggtacctgcaccatattgccacacatggaggagcgctgaacactgatgaagaatattacaaaactgtcaagcccagcgagcacgacg
gcgaatacctgtacgacatcgacaggaaacagtgcgtcaagaaagaactagtcactgggctagggctcacaggcgagctggtggat
cctcccttccatgaattcgcctacgagagtctgagaacacgaccagccgctccttaccaagtaccaaccataggggtgtatggcgtgcc
aggatcaggcaagtctggcatcattaaaagcgcagtcaccaaaaaagatctagtggtgagcgccaagaaagaaaactgtgcagaaat
tataagggacgtcaagaaaatgaaagggctggacgtcaatgccagaactgtggactcagtgctcttgaatggatgcaaacaccccgta
gagaccctgtatattgacgaagcttttgcttgtcatgcaggtactctcagagcgctcatagccattataagacctaaaaaggcagtgctct
gcggggatcccaaacagtgcggtttttttaacatgatgtgcctgaaagtgcattttaaccacgagatttgcacacaagtcttccacaaaag
catctctcgccgttgcactaaatctgtgacttcggtcgtctcaaccttgttttacgacaaaaaaatgagaacgacgaatccgaaagagact
aagattgtgattgacactaccggcagtaccaaacctaagcaggacgatctcattctcacttgtttcagaggggggtgaagcagttgcaa
atagattacaaaggcaacgaaataatgacggcagctgcctctcaagggctgacccgtaaaggtgtgtatgccgttcggtacaaggtga
atgaaaatcctctgtacgcacccacctcagaacatgtgaacgtcctactgacccgcacggaggaccgcatcgtgtggaaaacactagc
cggcgacccatggataaaaacactgactgccaagtaccctgggaatttcactgccacgatagaggagtggcaagcagagcatgatgc
catcatgaggcacatcttggagagaccggaccctaccgacgtcttccagaataaggcaaacgtgtgttgggccaaggctttagtgccg
gtgctgaagaccgctggcatagacatgaccactgaacaatggaacactgtggattattttgaaacggacaaagctcactcagcagaga
tagtattgaaccaactatgcgtgaggttctttggactcgatctggactccggtctattttctgcacccactgttccgttatccattaggaataa
tcactgggataactccccgtcgcctaacatgtacgggctgaataaagaagtggtccgtcagctctctcgcaggtacccacaactgcctc
gggcagttgccactggaagagtctatgacatgaacactggtacactgcgcaattatgatccgcgcataaacctagtacctgtaaacaga
agactgcctcatgctttagtcctccaccataatgaacacccacagagtgacttttcttcattcgtcagcaaattgaagggcagaactgtcct
ggtggtcggggaaaagttgtccgtcccaggcaaaatggttgactggttgtcagaccggcctgaggctaccttcagagctcggctggat
ttaggcatcccaggtgatgtgcccaaatatgacataatatttgttaatgtgaggaccccatataaataccatcactatcagcagtgtgaaga
ccatgccattaagcttagcatgttgaccaagaaagcttgtctgcatctgaatcccggcggaacctgtgtcagcataggttatggttacgct
gacagggccagcgaaagcatcattggtgctatagcgcggcagttcaagttttcccgggtatgcaaaccgaaatcctcacttgaagaga
cggaagttctgtttgtattcattgggtacgatcgcaaggcccgtacgcacaatccttacaagctttcatcaaccttgaccaacatttataca
ggttccagactccacgaagccggatgtgcaccctcatatcatgtggtgcgaggggatattgccacggccaccgaaggagtgattataa
atgctgctaacagcaaaggacaacctggcggaggggtgtgcggagcgctgtataagaaattcccggaaagcttcgatttacagccga
tcgaagtaggaaaagcgcgactggtcaaaggtgcagctaaacatatcattcatgccgtaggaccaaacttcaacaaagtttcggaggtt
gaaggtgacaaacagttggcagaggcttatgagtccatcgctaagattgtcaacgataacaattacaagtcagtagcgattccactgttg
tccaccggcatcttttccgggaacaaagatcgactaacccaatcattgaaccatttgctgacagctttagacaccactgatgcagatgtag
ccatatactgcagggacaagaaatgggaaatgactctcaaggaagcagtggctaggagagaagcagtggaggagatatgcatatcc
gacgactcttcagtgacagaacctgatgcagagctggtgagggtgcatccgaagagttctttggctggaaggaagggctacagcaca
agcgatggcaaaactttctcatatttggaagggaccaagtttcaccaggcggccaaggatatagcagaaattaatgccatgtggcccgt
tgcaacggaggccaatgagcaggtatgcatgtatatcctcggagaaagcatgagcagtattaggtcgaaatgccccgtcgaagagtc
ggaagcctccacaccacctagcacgctgccttgcttgtgcatccatgccatgactccagaaagagtacagcgcctaaaagcctcacgt
ccagaacaaattactgtgtgctcatcctttccattgccgaagtatagaatcactggtgtgcagaagatccaatgctcccagcctatattgtt
ctcaccgaaagtgcctgcgtatattcatccaaggaagtatctcgtggaaacaccaccggtagacgagactccggagccatcggcaga
gaaccaatccacagaggggacacctgaacaaccaccacttataaccgaggatgagaccaggactagaacgcctgagccgatcatca
tcgaagaggaagaagaggatagcataagtttgctgtcagatggcccgacccaccaggtgctgcaagtcgaggcagacattcacggg
ccgccctctgtatctagctcatcctggtccattcctcatgcatccgactttgatgtggacagtttatccatacttgacaccctggagggagct
agcgtgaccagcggggcaacgtcagccgagactaactcttacttcgcaaagagtatggagtttctggcgcgaccggtgcctgcgcct
cgaacagtattcaggaaccctccacatcccgctccgcgcacaagaacaccgtcacttgcacccagcagggcctgctcgagaaccag
cctagtttccaccccgccaggcgtgaatagggtgatcactagagaggagctcgaggcgcttaccccgtcacgcactcctagcaggtc
ggtctcgagaaccagcctggtctccaacccgccaggcgtaaatagggtgattacaagagaggagtttgaggcgttcgtagcacaaca
acaatgacggtttgatgcgggtgcatacatcttttcctccgacaccggtcaagggcatttacaacaaaaatcagtaaggcaaacggtgct
atccgaagtggtgttggagaggaccgaattggagatttcgtatgccccgcgcctcgaccaagaaaaagaagaattactacgcaagaa
attacagttaaatcccacacctgctaacagaagcagataccagtccaggaaggtggagaacatgaaagccataacagctagacgtatt
ctgcaaggcctagggcattatttgaaggcagaaggaaaagtggagtgctaccgaaccctgcatcctgttcctttgtattcatctagtgtga
accgtgccttttcaagccccaaggtcgcagtggaagcctgtaacgccatgttgaaagagaactttccgactgtggcttcttactgtattatt
ccagagtacgatgcctatttggacatggttgacggagcttcatgctgcttagacactgccagtttttgccctgcaaagctgcgcagctttc
caaagaaacactcctatttggaacccacaatacgatcggcagtgccttcagcgatccagaacacgctccagaacgtcctggcagctgc
cacaaaaagaaattgcaatgtcacgcaaatgagagaattgcccgtattggattcggcggcctttaatgtggaatgcttcaagaaatatgc
gtgtaataatgaatattgggaaacgtttaaagaaaaccccatcaggcttactgaagaaaacgtggtaaattacattaccaaattaaaagga
ccaaaagctgctgctctttttgcgaagacacataatttgaatatgttgcaggacataccaatggacaggtttgtaatggacttaaagagag
acgtgaaagtgactccaggaacaaaacatactgaagaacggcccaaggtacaggtgatccaggctgccgatccgctagcaacagcg
tatctgtgcggaatccaccgagagctggttaggagattaaatgcggtcctgcttccgaacattcatacactgtttgatatgtcggctgaag
actttgacgctattatagccgagcacttccagcctggggattgtgttctggaaactgacatcgcgtcgtttgataaaagtgaggacgacg
ccatggctctgaccgcgttaatgattctggaagacttaggtgtggacgcagagctgttgacgctgattgaggcggctttcggcgaaattt
catcaatacatttgcccactaaaactaaatttaaattcggagccatgatgaaatctggaatgttcctcacactgtttgtgaacacagtcatta
acattgtaatcgcaagcagagtgttgagagaacggctaaccggatcaccatgtgcagcattcattggagatgacaatatcgtgaaagga
gtcaaatcggacaaattaatggcagacaggtgcgccacctggttgaatatggaagtcaagattatagatgctgtggtgggcgagaaag
cgccttatttctgtggagggtttattttgtgtgactccgtgaccggcacagcgtgccgtgtggcagaccccctaaaaaggctgtttaagctt
ggcaaacctctggcagcagacgatgaacatgatgatgacaggagaagggcattgcatgaagagtcaacacgctggaaccgagtgg
gtattctttcagagctgtgcaaggcagtagaatcaaggtatgaaaccgtaggaacttccatcatagttatggccatgactactctagctag
cagtgttaaatcattcagctacctgagaggggcccctataactctctacggcTAAcctgaatggactacgacgtatcacgcccaaac
atttacagccgcggtgtcaaaaaccgcgtggacgtggttaacatccctgctgggaggatcagccgtaattattataattggcttggtgctg
gctactattgtggccatgtacgtgctgaccaaccagaaacataattgaatacagcagcaattggcaagctgcttacatagaactcgcgg
cgattggcatgccgccttaaaatttttattttattttttcttttcttttccgaatcggattttgtttttaatatttcAAAAAAAAAAAAA
AAAAAAAAAAAAAAAAAAAAAAAAAAAAAAAAAAAAAAAAAAAAAAAAAAAA
AAAAAAAAAAAAAAA
TC-83 Delivery Vector (SEQ ID NO: 7); TC-83 genome with nucleotides 7544-11175 deleted [alphavirus
structural proteins removed
ATAGGCGGCGCATGAGAGAAGCCCAGACCAATTACCTACCCAAAATGGAGAAAGTTCACGTTGAC
ATCGAGGAAGACAGCCCATTCCTCAGAGCTTTGCAGCGGAGCTTCCCGCAGTTTGAGGTAGAAGCC
AAGCAGGTCACTGATAATGACCATGCTAATGCCAGAGCGTTTTCGCATCTGGCTTCAAAACTGATC
GAAACGGAGGTGGACCCATCCGACACGATCCTTGACATTGGAAGTGCGCCCGCCCGCAGAATGTA
TTCTAAGCACAAGTATCATTGTATCTGTCCGATGAGATGTGCGGAAGATCCGGACAGATTGTATAA
GTATGCAACTAAGCTGAAGAAAAACTGTAAGGAAATAACTGATAAGGAATTGGACAAGAAAATG
AAGGAGCTCGCCGCCGTCATGAGCGACCCTGACCTGGAAACTGAGACTATGTGCCTCCACGACGA
CGAGTCGTGTCGCTACGAAGGGCAAGTCGCTGTTTACCAGGATGTATACGCGGTTGACGGACCGAC
AAGTCTCTATCACCAAGCCAATAAGGGAGTTAGAGTCGCCTACTGGATAGGCTTTGACACCACCCC
TTTTATGTTTAAGAACTTGGCTGGAGCATATCCATCATACTCTACCAACTGGGCCGACGAAACCGT
GTTAACGGCTCGTAACATAGGCCTATGCAGCTCTGACGTTATGGAGCGGTCACGTAGAGGGATGTC
CATTCTTAGAAAGAAGTATTTGAAACCATCCAACAATGTTCTATTCTCTGTTGGCTCGACCATCTAC
CACGAGAAGAGGGACTTACTGAGGAGCTGGCACCTGCCGTCTGTATTTCACTTACGTGGCAAGCAA
AATTACACATGTCGGTGTGAGACTATAGTTAGTTGCGACGGGTACGTCGTTAAAAGAATAGCTATC
AGTCCAGGCCTGTATGGGAAGCCTTCAGGCTATGCTGCTACGATGCACCGCGAGGGATTCTTGTGC
TGCAAAGTGACAGACACATTGAACGGGGAGAGGGTCTCTTTTCCCGTGTGCACGTATGTGCCAGCT
ACATTGTGTGACCAAATGACTGGCATACTGGCAACAGATGTCAGTGCGGACGACGCGCAAAAACT
GCTGGTTGGGCTCAACCAGCGTATAGTCGTCAACGGTCGCACCCAGAGAAACACCAATACCATGA
AAAATTACCTTTTGCCCGTAGTGGCCCAGGCATTTGCTAGGTGGGCAAAGGAATATAAGGAAGATC
AAGAAGATGAAAGGCCACTAGGACTACGAGATAGACAGTTAGTCATGGGGTGTTGTTGGGCTTTT
AGAAGGCACAAGATAACATCTATTTATAAGCGCCCGGATACCCAAACCATCATCAAAGTGAACAG
CGATTTCCACTCATTCGTGCTGCCCAGGATAGGCAGTAACACATTGGAGATCGGGCTGAGAACAAG
AATCAGGAAAATGTTAGAGGAGCACAAGGAGCCGTCACCTCTCATTACCGCCGAGGACGTACAAG
AAGCTAAGTGCGCAGCCGATGAGGCTAAGGAGGTGCGTGAAGCCGAGGAGTTGCGCGCAGCTCTA
CCACCTTTGGCAGCTGATGTTGAGGAGCCCACTCTGGAAGCCGATGTCGACTTGATGTTACAAGAG
GCTGGGGCCGGCTCAGTGGAGACACCTCGTGGCTTGATAAAGGTTACCAGCTACGATGGCGAGGA
CAAGATCGGCTCTTACGCTGTGCTTTCTCCGCAGGCTGTACTCAAGAGTGAAAAATTATCTTGCATC
CACCCTCTCGCTGAACAAGTCATAGTGATAACACACTCTGGCCGAAAAGGGCGTTATGCCGTGGAA
CCATACCATGGTAAAGTAGTGGTGCCAGAGGGACATGCAATACCCGTCCAGGACTTTCAAGCTCTG
AGTGAAAGTGCCACCATTGTGTACAACGAACGTGAGTTCGTAAACAGGTACCTGCACCATATTGCC
ACACATGGAGGAGCGCTGAACACTGATGAAGAATATTACAAAACTGTCAAGCCCAGCGAGCACGA
CGGCGAATACCTGTACGACATCGACAGGAAACAGTGCGTCAAGAAAGAACTAGTCACTGGGCTAG
GGCTCACAGGCGAGCTGGTGGATCCTCCCTTCCATGAATTCGCCTACGAGAGTCTGAGAACACGAC
CAGCCGCTCCTTACCAAGTACCAACCATAGGGGTGTATGGCGTGCCAGGATCAGGCAAGTCTGGC
ATCATTAAAAGCGCAGTCACCAAAAAAGATCTAGTGGTGAGCGCCAAGAAAGAAAACTGTGCAGA
AATTATAAGGGACGTCAAGAAAATGAAAGGGCTGGACGTCAATGCCAGAACTGTGGACTCAGTGC
TCTTGAATGGATGCAAACACCCCGTAGAGACCCTGTATATTGACGAAGCTTTTGCTTGTCATGCAG
GTACTCTCAGAGCGCTCATAGCCATTATAAGACCTAAAAAGGCAGTGCTCTGCGGGGATCCCAAAC
AGTGCGGTTTTTTTAACATGATGTGCCTGAAAGTGCATTTTAACCACGAGATTTGCACACAAGTCTT
CCACAAAAGCATCTCTCGCCGTTGCACTAAATCTGTGACTTCGGTCGTCTCAACCTTGTTTTACGAC
AAAAAAATGAGAACGACGAATCCGAAAGAGACTAAGATTGTGATTGACACTACCGGCAGTACCAA
ACCTAAGCAGGACGATCTCATTCTCACTTGTTTCAGAGGGTGGGTGAAGCAGTTGCAAATAGATTA
CAAAGGCAACGAAATAATGACGGCAGCTGCCTCTCAAGGGCTGACCCGTAAAGGTGTGTATGCCG
TTCGGTACAAGGTGAATGAAAATCCTCTGTACGCACCCACCTCAGAACATGTGAACGTCCTACTGA
CCCGCACGGAGGACCGCATCGTGTGGAAAACACTAGCCGGCGACCCATGGATAAAAACACTGACT
GCCAAGTACCCTGGGAATTTCACTGCCACGATAGAGGAGTGGCAAGCAGAGCATGATGCCATCAT
GAGGCACATCTTGGAGAGACCGGACCCTACCGACGTCTTCCAGAATAAGGCAAACGTGTGTTGGG
CCAAGGCTTTAGTGCCGGTGCTGAAGACCGCTGGCATAGACATGACCACTGAACAATGGAACACT
GTGGATTATTTTGAAACGGACAAAGCTCACTCAGCAGAGATAGTATTGAACCAACTATGCGTGAG
GTTCTTTGGACTCGATCTGGACTCCGGTCTATTTTCTGCACCCACTGTTCCGTTATCCATTAGGAAT
AATCACTGGGATAACTCCCCGTCGCCTAACATGTACGGGCTGAATAAAGAAGTGGTCCGTCAGCTC
TCTCGCAGGTACCCACAACTGCCTCGGGCAGTTGCCACTGGAAGAGTCTATGACATGAACACTGGT
ACACTGCGCAATTATGATCCGCGCATAAACCTAGTACCTGTAAACAGAAGACTGCCTCATGCTTTA
GTCCTCCACCATAATGAACACCCACAGAGTGACTTTTCTTCATTCGTCAGCAAATTGAAGGGCAGA
ACTGTCCTGGTGGTCGGGGAAAAGTTGTCCGTCCCAGGCAAAATGGTTGACTGGTTGTCAGACCGG
CCTGAGGCTACCTTCAGAGCTCGGCTGGATTTAGGCATCCCAGGTGATGTGCCCAAATATGACATA
ATATTTGTTAATGTGAGGACCCCATATAAATACCATCACTATCAGCAGTGTGAAGACCATGCCATT
AAGCTTAGCATGTTGACCAAGAAAGCTTGTCTGCATCTGAATCCCGGCGGAACCTGTGTCAGCATA
GGTTATGGTTACGCTGACAGGGCCAGCGAAAGCATCATTGGTGCTATAGCGCGGCAGTTCAAGTTT
TCCCGGGTATGCAAACCGAAATCCTCACTTGAAGAGACGGAAGTTCTGTTTGTATTCATTGGGTAC
GATCGCAAGGCCCGTACGCACAATCCTTACAAGCTTTCATCAACCTTGACCAACATTTATACAGGT
TCCAGACTCCACGAAGCCGGATGTGCACCCTCATATCATGTGGTGCGAGGGGATATTGCCACGGCC
ACCGAAGGAGTGATTATAAATGCTGCTAACAGCAAAGGACAACCTGGCGGAGGGGTGTGCGGAGC
GCTGTATAAGAAATTCCCGGAAAGCTTCGATTTACAGCCGATCGAAGTAGGAAAAGCGCGACTGG
TCAAAGGTGCAGCTAAACATATCATTCATGCCGTAGGACCAAACTTCAACAAAGTTTCGGAGGTTG
AAGGTGACAAACAGTTGGCAGAGGCTTATGAGTCCATCGCTAAGATTGTCAACGATAACAATTAC
AAGTCAGTAGCGATTCCACTGTTGTCCACCGGCATCTTTTCCGGGAACAAAGATCGACTAACCCAA
TCATTGAACCATTTGCTGACAGCTTTAGACACCACTGATGCAGATGTAGCCATATACTGCAGGGAC
AAGAAATGGGAAATGACTCTCAAGGAAGCAGTGGCTAGGAGAGAAGCAGTGGAGGAGATATGCA
TATCCGACGACTCTTCAGTGACAGAACCTGATGCAGAGCTGGTGAGGGTGCATCCGAAGAGTTCTT
TGGCTGGAAGGAAGGGCTACAGCACAAGCGATGGCAAAACTTTCTCATATTTGGAAGGGACCAAG
TTTCACCAGGCGGCCAAGGATATAGCAGAAATTAATGCCATGTGGCCCGTTGCAACGGAGGCCAA
TGAGCAGGTATGCATGTATATCCTCGGAGAAAGCATGAGCAGTATTAGGTCGAAATGCCCCGTCG
AAGAGTCGGAAGCCTCCACACCACCTAGCACGCTGCCTTGCTTGTGCATCCATGCCATGACTCCAG
AAAGAGTACAGCGCCTAAAAGCCTCACGTCCAGAACAAATTACTGTGTGCTCATCCTTTCCATTGC
CGAAGTATAGAATCACTGGTGTGCAGAAGATCCAATGCTCCCAGCCTATATTGTTCTCACCGAAAG
TGCCTGCGTATATTCATCCAAGGAAGTATCTCGTGGAAACACCACCGGTAGACGAGACTCCGGAGC
CATCGGCAGAGAACCAATCCACAGAGGGGACACCTGAACAACCACCACTTATAACCGAGGATGAG
ACCAGGACTAGAACGCCTGAGCCGATCATCATCGAAGAGGAAGAAGAGGATAGCATAAGTTTGCT
GTCAGATGGCCCGACCCACCAGGTGCTGCAAGTCGAGGCAGACATTCACGGGCCGCCCTCTGTATC
TAGCTCATCCTGGTCCATTCCTCATGCATCCGACTTTGATGTGGACAGTTTATCCATACTTGACACC
CTGGAGGGAGCTAGCGTGACCAGCGGGGCAACGTCAGCCGAGACTAACTCTTACTTCGCAAAGAG
TATGGAGTTTCTGGCGCGACCGGTGCCTGCGCCTCGAACAGTATTCAGGAACCCTCCACATCCCGC
TCCGCGCACAAGAACACCGTCACTTGCACCCAGCAGGGCCTGCTCGAGAACCAGCCTAGTTTCCAC
CCCGCCAGGCGTGAATAGGGTGATCACTAGAGAGGAGCTCGAGGCGCTTACCCCGTCACGCACTC
CTAGCAGGTCGGTCTCGAGAACCAGCCTGGTCTCCAACCCGCCAGGCGTAAATAGGGTGATTACA
AGAGAGGAGTTTGAGGCGTTCGTAGCACAACAACAATGACGGTTTGATGCGGGTGCATACATCTTT
TCCTCCGACACCGGTCAAGGGCATTTACAACAAAAATCAGTAAGGCAAACGGTGCTATCCGAAGT
GGTGTTGGAGAGGACCGAATTGGAGATTTCGTATGCCCCGCGCCTCGACCAAGAAAAAGAAGAAT
TACTACGCAAGAAATTACAGTTAAATCCCACACCTGCTAACAGAAGCAGATACCAGTCCAGGAAG
GTGGAGAACATGAAAGCCATAACAGCTAGACGTATTCTGCAAGGCCTAGGGCATTATTTGAAGGC
AGAAGGAAAAGTGGAGTGCTACCGAACCCTGCATCCTGTTCCTTTGTATTCATCTAGTGTGAACCG
TGCCTTTTCAAGCCCCAAGGTCGCAGTGGAAGCCTGTAACGCCATGTTGAAAGAGAACTTTCCGAC
TGTGGCTTCTTACTGTATTATTCCAGAGTACGATGCCTATTTGGACATGGTTGACGGAGCTTCATGC
TGCTTAGACACTGCCAGTTTTTGCCCTGCAAAGCTGCGCAGCTTTCCAAAGAAACACTCCTATTTGG
AACCCACAATACGATCGGCAGTGCCTTCAGCGATCCAGAACACGCTCCAGAACGTCCTGGCAGCT
GCCACAAAAAGAAATTGCAATGTCACGCAAATGAGAGAATTGCCCGTATTGGATTCGGCGGCCTTT
AATGTGGAATGCTTCAAGAAATATGCGTGTAATAATGAATATTGGGAAACGTTTAAAGAAAACCC
CATCAGGCTTACTGAAGAAAACGTGGTAAATTACATTACCAAATTAAAAGGACCAAAAGCTGCTG
CTCTTTTTGCGAAGACACATAATTTGAATATGTTGCAGGACATACCAATGGACAGGTTTGTAATGG
ACTTAAAGAGAGACGTGAAAGTGACTCCAGGAACAAAACATACTGAAGAACGGCCCAAGGTACA
GGTGATCCAGGCTGCCGATCCGCTAGCAACAGCGTATCTGTGCGGAATCCACCGAGAGCTGGTTAG
GAGATTAAATGCGGTCCTGCTTCCGAACATTCATACACTGTTTGATATGTCGGCTGAAGACTTTGA
CGCTATTATAGCCGAGCACTTCCAGCCTGGGGATTGTGTTCTGGAAACTGACATCGCGTCGTTTGA
TAAAAGTGAGGACGACGCCATGGCTCTGACCGCGTTAATGATTCTGGAAGACTTAGGTGTGGACG
CAGAGCTGTTGACGCTGATTGAGGCGGCTTTCGGCGAAATTTCATCAATACATTTGCCCACTAAAA
CTAAATTTAAATTCGGAGCCATGATGAAATCTGGAATGTTCCTCACACTGTTTGTGAACACAGTCA
TTAACATTGTAATCGCAAGCAGAGTGTTGAGAGAACGGCTAACCGGATCACCATGTGCAGCATTCA
TTGGAGATGACAATATCGTGAAAGGAGTCAAATCGGACAAATTAATGGCAGACAGGTGCGCCACC
TGGTTGAATATGGAAGTCAAGATTATAGATGCTGTGGTGGGCGAGAAAGCGCCTTATTTCTGTGGA
GGGTTTATTTTGTGTGACTCCGTGACCGGCACAGCGTGCCGTGTGGCAGACCCCCTAAAAAGGCTG
TTTAAGCTTGGCAAACCTCTGGCAGCAGACGATGAACATGATGATGACAGGAGAAGGGCATTGCA
TGAAGAGTCAACACGCTGGAACCGAGTGGGTATTCTTTCAGAGCTGTGCAAGGCAGTAGAATCAA
GGTATGAAACCGTAGGAACTTCCATCATAGTTATGGCCATGACTACTCTAGCTAGCAGTGTTAAAT
CATTCAGCTACCTGAGAGGGGCCCCTATAACTCTCTACGGCTAACCTGAATGGACTACGACATAGT
CTAGTCCGCCAAGATGTTCCCGTTCCAGCCAATGTATCCGATGCAGCCAATGCCCTATCGCAACCC
GTTCGCGGCCCCGCGCAGGCCCTGGTTCCCCAGAACCGACCCTTTTCTGGCGATGCAGGTGCAGGA
ATTAACCCGCTCGATGGCTAACCTGACGTTCAAGCAACGCCGGGACGCGCCACCTGAGGGGCCAT
CCGCTAAGAAACCGAAGAAGGAGGCCTCGCAAAAACAGAAAGGGGGAGGCCAAGGGAAGAAGA
AGAAGAACCAAGGGAAGAAGAAGGCTAAGACAGGGCCGCCTAATCCGAAGGCACAGAATGGAAA
CAAGAAGAAGACCAACAAGAAACCAGGCAAGAGACAGCGCATGGTCATGAAATTGGAATCTGAC
AAGACGTTCCCAATCATGTTGGAAGGGAAGATAAACGGCTACGCTTGTGTGGTCGGAGGGAAGTT
ATTCAGGCCGATGCATGTGGAAGGCAAGATCGACAACGACGTTCTGGCCGCGCTTAAGACGAAGA
AAGCATCCAAATACGATCTTGAGTATGCAGATGTGCCACAGAACATGCGGGCCGATACATTCAAA
TACACCCATGAGAAACCCCAAGGCTATTACAGCTGGCATCATGGAGCAGTCCAATATGAAAATGG
GCGTTTCACGGTGCCGAAAGGAGTTGGGGCCAAGGGAGACAGCGGACGACCCATTCTGGATAACC
AGGGACGGGTGGTCGCTATTGTGCTGGGAGGTGTGAATGAAGGATCTAGGACAGCCCTTTCAGTC
GTCATGTGGAACGAGAAGGGAGTTACCGTGAAGTATACTCCGGAGAACTGCGAGCAATGGTCACT
AGTGACCACCATGTGTCTGCTCGCCAATGTGACGTTCCCATGTGCTCAACCACCAATTTGCTACGA
CAGAAAACCAGCAGAGACTTTGGCCATGCTCAGCGTTAACGTTGACAACCCGGGCTACGATGAGC
TGCTGGAAGCAGCTGTTAAGTGCCCCGGAAGGAAAAGGAGATCCACCGAGGAGCTGTTTAATGAG
TATAAGCTAACGCGCCCTTACATGGCCAGATGCATCAGATGTGCAGTTGGGAGCTGCCATAGTCCA
ATAGCAATCGAGGCAGTAAAGAGCGACGGGCACGACGGTTATGTTAGACTTCAGACTTCCTCGCA
GTATGGCCTGGATTCCTCCGGCAACTTAAAGGGCAGGACCATGCGGTATGACATGCACGGGACCA
TTAAAGAGATACCACTACATCAAGTGTCACTCTATACATCTCGCCCGTGTCACATTGTGGATGGGC
ACGGTTATTTCCTGCTTGCCAGGTGCCCGGCAGGGGACTCCATCACCATGGAATTTAAGAAAGATT
CCGTCAGACACTCCTGCTCGGTGCCGTATGAAGTGAAATTTAATCCTGTAGGCAGAGAACTCTATA
CTCATCCCCCAGAACACGGAGTAGAGCAAGCGTGCCAAGTCTACGCACATGATGCACAGAACAGA
GGAGCTTATGTCGAGATGCACCTCCCGGGCTCAGAAGTGGACAGCAGTTTGGTTTCCTTGAGCGGC
AGTTCAGTCACCGTGACACCTCCTGATGGGACTAGCGCCCTGGTGGAATGCGAGTGTGGCGGCACA
AAGATCTCCGAGACCATCAACAAGACAAAACAGTTCAGCCAGTGCACAAAGAAGGAGCAGTGCA
GAGCATATCGGCTGCAGAACGATAAGTGGGTGTATAATTCTGACAAACTGCCCAAAGCAGCGGGA
GCCACCTTAAAAGGAAAACTGCATGTCCCATTCTTGCTGGCAGACGGCAAATGCACCGTGCCTCTA
GCACCAGAACCTATGATAACCTTCGGTTTCAGATCAGTGTCACTGAAACTGCACCCTAAGAATCCC
ACATATCTAATCACCCGCCAACTTGCTGATGAGCCTCACTACACGCACGAGCTCATATCTGAACCA
GCTGTTAGGAATTTTACCGTCACCGAAAAAGGGTGGGAGTTTGTATGGGGAAACCACCCGCCGAA
AAGGTTTTGGGCACAGGAAACAGCACCCGGAAATCCACATGGGCTACCGCACGAGGTGATAACTC
ATTATTACCACAGATACCCTATGTCCACCATCCTGGGTTTGTCAATTTGTGCCGCCATTGCAACCGT
TTCCGTTGCAGCGTCTACCTGGCTGTTTTGCAGATCTAGAGTTGCGTGCCTAACTCCTTACCGGCTA
ACACCTAACGCTAGGATACCATTTTGTCTGGCTGTGCTTTGCTGCGCCCGCACTGCCCGGGCCGAG
ACCACCTGGGAGTCCTTGGATCACCTATGGAACAATAACCAACAGATGTTCTGGATTCAATTGCTG
ATCCCTCTGGCCGCCTTGATCGTAGTGACTCGCCTGCTCAGGTGCGTGTGCTGTGTCGTGCCTTTTT
TAGTCATGGCCGGCGCCGCAGGCGCCGGCGCCTACGAGCACGCGACCACGATGCCGAGCCAAGCG
GGAATCTCGTATAACACTATAGTCAACAGAGCAGGCTACGCACCACTCCCTATCAGCATAACACCA
ACAAAGATCAAGCTGATACCTACAGTGAACTTGGAGTACGTCACCTGCCACTACAAAACAGGAAT
GGATTCACCAGCCATCAAATGCTGCGGATCTCAGGAATGCACTCCAACTTACAGGCCTGATGAACA
GTGCAAAGTCTTCACAGGGGTTTACCCGTTCATGTGGGGTGGTGCATATTGCTTTTGCGACACTGA
GAACACCCAAGTCAGCAAGGCCTACGTAATGAAATCTGACGACTGCCTTGCGGATCATGCTGAAG
CATATAAAGCGCACACAGCCTCAGTGCAGGCGTTCCTCAACATCACAGTGGGAGAACACTCTATTG
TGACTACCGTGTATGTGAATGGAGAAACTCCTGTGAATTTCAATGGGGTCAAAATAACTGCAGGTC
CGCTTTCCACAGCTTGGACACCCTTTGATCGCAAAATCGTGCAGTATGCCGGGGAGATCTATAATT
ATGATTTTCCTGAGTATGGGGCAGGACAACCAGGAGCATTTGGAGATATACAATCCAGAACAGTCT
CAAGCTCTGATCTGTATGCCAATACCAACCTAGTGCTGCAGAGACCCAAAGCAGGAGCGATCCAC
GTGCCATACACTCAGGCACCTTCGGGTTTTGAGCAATGGAAGAAAGATAAAGCTCCATCATTGAAA
TTTACCGCCCCTTTCGGATGCGAAATATATACAAACCCCATTCGCGCCGAAAACTGTGCTGTAGGG
TCAATTCCATTAGCCTTTGACATTCCCGACGCCTTGTTCACCAGGGTGTCAGAAACACCGACACTTT
CAGCGGCCGAATGCACTCTTAACGAGTGCGTGTATTCTTCCGACTTTGGTGGGATCGCCACGGTCA
AGTACTCGGCCAGCAAGTCAGGCAAGTGCGCAGTCCATGTGCCATCAGGGACTGCTACCCTAAAA
GAAGCAGCAGTCGAGCTAACCGAGCAAGGGTCGGCGACTATCCATTTCTCGACCGCAAATATCCA
CCCGGAGTTCAGGCTCCAAATATGCACATCATATGTTACGTGCAAAGGTGATTGTCACCCCCCGAA
AGACCATATTGTGACACACCCTCAGTATCACGCCCAAACATTTACAGCCGCGGTGTCAAAAACCGC
GTGGACGTGGTTAACATCCCTGCTGGGAGGATCAGCCGTAATTATTATAATTGGCTTGGTGCTGGC
TACTATTGTGGCCATGTACGTGCTGACCAACCAGAAACATAATTGAATACAGCAGCAATTGGCAAG
CTGCTTACATAGAACTCGCGGCGATTGGCATGCCGCCTTAAAATTTTTATTTTATTTTTCTTTTCTTT
TCCGAATCGGATTTTGTTTTTAATATTTC
VEE Production Vector (SEQ ID NO: 8); VEE genome with nucleotides 7544-11175 deleted, plus 5′ T7-
promoter, plus 3′ restriction sites
TAATACGACTCACTATAGGATGggcggcgcatgagagaagcccagaccaattacctacccaaaATGGagaaagttcacgttgacatcga
ggaagacagcccattcctcagagctttgcagcggagcttcccgcagtttgaggtagaagccaagcaggtcactgataatgaccatgctaatgccagagcgttttcg
catctggcttcaaaactgatcgaaacggaggtggacccatccgacacgatccttgacattggaagtgcgcccgcccgcagaatgtattctaagcacaagtatcattg
tatctgtccgatgagatgtgcggaagatccggacagattgtataagtatgcaactaagctgaagaaaaactgtaaggaaataactgataaggaattggacaagaaaa
tgaaggagctcgccgccgtcatgagcgaccctgacctggaaactgagactatgtgcctccacgacgacgagtcgtgtcgctacgaagggcaagtcgctgtttacc
aggatgtatacgcggttgacggaccgacaagtctctatcaccaagccaataagggagttagagtcgcctactggataggctttgacaccaccccttttatgtttaaga
acttggctggagcatatccatcatactctaccaactgggccgacgaaaccgtgttaacggctcgtaacataggcctatgcagctctgacgttatggagcggtcacgt
agagggatgtccattcttagaaagaagtatttgaaaccatccaacaatgttctattctctgttggctcgaccatctaccacgagaagagggacttactgaggagctggc
acctgccgtctgtatttcacttacgtggcaagcaaaattacacatgtcggtgtgagactatagttagttgcgacgggtacgtcgttaaaagaatagctatcagtccagg
cctgtatgggaagccttcaggctatgctgctacgatgcaccgcgagggattcttgtgctgcaaagtgacagacacattgaacggggagagggtctcttttcccgtgt
gcacgtatgtgccagctacattgtgtgaccaaatgactggcatactggcaacagatgtcagtgcggacgacgcgcaaaaactgctggttgggctcaaccagcgtat
agtcgtcaacggtcgcacccagagaaacaccaataccatgaaaaattaccttttgcccgtagtggcccaggcatttgctaggtgggcaaaggaatataaggaagat
caagaagatgaaaggccactaggactacgagatagacagttagtcatggggtgttgttgggcttttagaaggcacaagataacatctatttataagcgcccggatac
ccaaaccatcatcaaagtgaacagcgatttccactcattcgtgctgcccaggataggcagtaacacattggagatcgggctgagaacaagaatcaggaaaatgtta
gaggagcacaaggagccgtcacctctcattaccgccgaggacgtacaagaagctaagtgcgcagccgatgaggctaaggaggtgcgtgaagccgaggagttg
cgcgcagctctaccacctttggcagctgatgttgaggagcccactctggaagccgatgtcgacttgatgttacaagaggctggggccggctcagtggagacacctc
gtggcttgataaaggttaccagctacgctggcgaggacaagatcggctcttacgctgtgctttctccgcaggctgtactcaagagtgaaaaattatcttgcatccaccc
tctcgctgaacaagtcatagtgataacacactctggccgaaaagggcgttatgccgtggaaccataccatggtaaagtagtggtgccagagggacatgcaataccc
gtccaggactttcaagctctgagtgaaagtgccaccattgtgtacaacgaacgtgagttcgtaaacaggtacctgcaccatattgccacacatggaggagcgctgaa
cactgatgaagaatattacaaaactgtcaagcccagcgagcacgacggcgaatacctgtacgacatcgacaggaaacagtgcgtcaagaaagaactagtcactg
ggctagggctcacaggcgagctggtggatcctcccttccatgaattcgcctacgagagtctgagaacacgaccagccgctccttaccaagtaccaaccatagggg
tgtatggcgtgccaggatcaggcaagtctggcatcattaaaagcgcagtcaccaaaaaagatctagtggtgagcgccaagaaagaaaactgtgcagaaattataa
gggacgtcaagaaaatgaaagggctggacgtcaatgccagaactgtggactcagtgctcttgaatggatgcaaacaccccgtagagaccctgtatattgacgaag
cttttgcttgtcatgcaggtactctcagagcgctcatagccattataagacctaaaaaggcagtgctctgcggggatcccaaacagtgcggtttttttaacatgatgtgc
ctgaaagtgcattttaaccacgagatttgcacacaagtcttccacaaaagcatctctcgccgttgcactaaatctgtgacttcggtcgtctcaaccttgttttacgacaaa
aaaatgagaacgacgaatccgaaagagactaagattgtgattgacactaccggcagtaccaaacctaagcaggacgatctcattctcacttgtttcagaggggggt
gaagcagttgcaaatagattacaaaggcaacgaaataatgacggcagctgcctctcaagggctgacccgtaaaggtgtgtatgccgttcggtacaaggtgaatgaa
aatcctctgtacgcacccacctcagaacatgtgaacgtcctactgacccgcacggaggaccgcatcgtgtggaaaacactagccggcgacccatggataaaaaca
ctgactgccaagtaccctgggaatttcactgccacgatagaggagtggcaagcagagcatgatgccatcatgaggcacatcttggagagaccggaccctaccgac
gtcttccagaataaggcaaacgtgtgttgggccaaggctttagtgccggtgctgaagaccgctggcatagacatgaccactgaacaatggaacactgtggattatttt
gaaacggacaaagctcactcagcagagatagtattgaaccaactatgcgtgaggttctttggactcgatctggactccggtctattttctgcacccactgttccgttatc
cattaggaataatcactgggataactccccgtcgcctaacatgtacgggctgaataaagaagtggtccgtcagctctctcgcaggtacccacaactgcctcgggca
gttgccactggaagagtctatgacatgaacactggtacactgcgcaattatgatccgcgcataaacctagtacctgtaaacagaagactgcctcatgctttagtcctcc
accataatgaacacccacagagtgacttttcttcattcgtcagcaaattgaagggcagaactgtcctggtggtcggggaaaagttgtccgtcccaggcaaaatggttg
actggttgtcagaccggcctgaggctaccttcagagctcggctggatttaggcatcccaggtgatgtgcccaaatatgacataatatttgttaatgtgaggaccccata
taaataccatcactatcagcagtgtgaagaccatgccattaagcttagcatgttgaccaagaaagcttgtctgcatctgaatcccggcggaacctgtgtcagcataggt
tatggttacgctgacagggccagcgaaagcatcattggtgctatagcgcggcagttcaagttttcccgggtatgcaaaccgaaatcctcacttgaagagacggaagt
tctgtttgtattcattgggtacgatcgcaaggcccgtacgcacaatccttacaagctttcatcaaccttgaccaacatttatacaggttccagactccacgaagccggat
gtgcaccctcatatcatgtggtgcgaggggatattgccacggccaccgaaggagtgattataaatgctgctaacagcaaaggacaacctggcggaggggtgtgcg
gagcgctgtataagaaattcccggaaagcttcgatttacagccgatcgaagtaggaaaagcgcgactggtcaaaggtgcagctaaacatatcattcatgccgtagg
accaaacttcaacaaagtttcggaggttgaaggtgacaaacagttggcagaggcttatgagtccatcgctaagattgtcaacgataacaattacaagtcagtagcgat
tccactgttgtccaccggcatcttttccgggaacaaagatcgactaacccaatcattgaaccatttgctgacagctttagacaccactgatgcagatgtagccatatact
gcagggacaagaaatgggaaatgactctcaaggaagcagtggctaggagagaagcagtggaggagatatgcatatccgacgactcttcagtgacagaacctgat
gcagagctggtgagggtgcatccgaagagttctttggctggaaggaagggctacagcacaagcgatggcaaaactttctcatatttggaagggaccaagtttcacc
aggcggccaaggatatagcagaaattaatgccatgtggcccgttgcaacggaggccaatgagcaggtatgcatgtatatcctcggagaaagcatgagcagtatta
ggtcgaaatgccccgtcgaagagtcggaagcctccacaccacctagcacgctgccttgcttgtgcatccatgccatgactccagaaagagtacagcgcctaaaag
cctcacgtccagaacaaattactgtgtgctcatcctttccattgccgaagtatagaatcactggtgtgcagaagatccaatgctcccagcctatattgttctcaccgaaa
gtgcctgcgtatattcatccaaggaagtatctcgtggaaacaccaccggtagacgagactccggagccatcggcagagaaccaatccacagaggggacacctga
acaaccaccacttataaccgaggatgagaccaggactagaacgcctgagccgatcatcatcgaagaggaagaagaggatagcataagtttgctgtcagatggcc
cgacccaccaggtgctgcaagtcgaggcagacattcacgggccgccctctgtatctagctcatcctggtccattcctcatgcatccgactttgatgtggacagtttatc
catacttgacaccctggagggagctagcgtgaccagcggggcaacgtcagccgagactaactcttacttcgcaaagagtatggagtttctggcgcgaccggtgcc
tgcgcctcgaacagtattcaggaaccctccacatcccgctccgcgcacaagaacaccgtcacttgcacccagcagggcctgctcgagaaccagcctagtttccac
cccgccaggcgtgaatagggtgatcactagagaggagctcgaggcgcttaccccgtcacgcactcctagcaggtcggtctcgagaaccagcctggtctccaacc
cgccaggcgtaaatagggtgattacaagagaggagtttgaggcgttcgtagcacaacaacaatgacggtttgatgcgggtgcatacatcttttcctccgacaccggt
caagggcatttacaacaaaaatcagtaaggcaaacggtgctatccgaagtggtgttggagaggaccgaattggagatttcgtatgccccgcgcctcgaccaagaa
aaagaagaattactacgcaagaaattacagttaaatcccacacctgctaacagaagcagataccagtccaggaaggtggagaacatgaaagccataacagctaga
cgtattctgcaaggcctagggcattatttgaaggcagaaggaaaagtggagtgctaccgaaccctgcatcctgttcctttgtattcatctagtgtgaaccgtgccttttc
aagccccaaggtcgcagtggaagcctgtaacgccatgttgaaagagaactttccgactgtggcttcttactgtattattccagagtacgatgcctatttggacatggttg
acggagcttcatgctgcttagacactgccagtttttgccctgcaaagctgcgcagctttccaaagaaacactcctatttggaacccacaatacgatcggcagtgccttc
agcgatccagaacacgctccagaacgtcctggcagctgccacaaaaagaaattgcaatgtcacgcaaatgagagaattgcccgtattggattcggggcctttaat
gtggaatgcttcaagaaatatgcgtgtaataatgaatattgggaaacgtttaaagaaaaccccatcaggcttactgaagaaaacgtggtaaattacattaccaaattaa
aaggaccaaaagctgctgctctttttgcgaagacacataatttgaatatgttgcaggacataccaatggacaggtttgtaatggacttaaagagagacgtgaaagtga
ctccaggaacaaaacatactgaagaacggcccaaggtacaggtgatccaggctgccgatccgctagcaacagcgtatctgtgcggaatccaccgagagctggtt
aggagattaaatgcggtcctgcttccgaacattcatacactgtttgatatgtcggctgaagactttgacgctattatagccgagcacttccagcctggggattgtgttctg
gaaactgacatcgcgtcgtttgataaaagtgaggacgacgccatggctctgaccgcgttaatgattctggaagacttaggtgtggacgcagagctgttgacgctgat
tgaggcggctttcggcgaaatttcatcaatacatttgcccactaaaactaaatttaaattcggagccatgatgaaatctggaatgttcctcacactgtttgtgaacacagt
cattaacattgtaatcgcaagcagagtgttgagagaacggctaaccggatcaccatgtgcagcattcattggagatgacaatatcgtgaaaggagtcaaatcggaca
aattaatggcagacaggtgcgccacctggttgaatatggaagtcaagattatagatgctgtggtgggcgagaaagcgccttatttctgtggagggtttattttgtgtga
ctccgtgaccggcacagcgtgccgtgtggcagaccccctaaaaaggctgtttaagcttggcaaacctctggcagcagacgatgaacatgatgatgacaggagaa
gggcattgcatgaagagtcaacacgctggaaccgagtgggtattctttcagagctgtgcaaggcagtagaatcaaggtatgaaaccgtaggaacttccatcatagtt
atggccatgactactctagctagcagtgttaaatcattcagctacctgagaggggcccctataactctctacggcTAAcctgaatggactacgacgtatcacgccc
aaacatttacagccgcggtgtcaaaaaccgcgtggacgtggttaacatccctgctgggaggatcagccgtaattattataattggcttggtgctggctactattgtggc
catgtacgtgctgaccaaccagaaacataattgaatacagcagcaattggcaagctgcttacatagaactcgcggcgattggcatgccgccttaaaatttttattttattt
tttcttttcttttccgaatcggattttgtttttaatatttcAAAAAAAAAAAAAAAAAAAAAAAAAAAAAAAAAAAAAAAAAA
AAAAAAAAAAAAAAAAAAAAAAAAAAAAAAAAAAAAAA
TC-83 Production Vector (SEQ ID NO: 9); TC-83 genome with nucleotides 7544-11175 deleted, plus 5′ T7-
promoter, plus 3′ restriction sites
ATAGGCGGCGCATGAGAGAAGCCCAGACCAATTACCTACCCAAAATGGAGAAAGTTCACGTTGAC
ATCGAGGAAGACAGCCCATTCCTCAGAGCTTTGCAGCGGAGCTTCCCGCAGTTTGAGGTAGAAGCC
AAGCAGGTCACTGATAATGACCATGCTAATGCCAGAGCGTTTTCGCATCTGGCTTCAAAACTGATC
GAAACGGAGGTGGACCCATCCGACACGATCCTTGACATTGGAAGTGCGCCCGCCCGCAGAATGTA
TTCTAAGCACAAGTATCATTGTATCTGTCCGATGAGATGTGCGGAAGATCCGGACAGATTGTATAA
GTATGCAACTAAGCTGAAGAAAAACTGTAAGGAAATAACTGATAAGGAATTGGACAAGAAAATG
AAGGAGCTCGCCGCCGTCATGAGCGACCCTGACCTGGAAACTGAGACTATGTGCCTCCACGACGA
CGAGTCGTGTCGCTACGAAGGGCAAGTCGCTGTTTACCAGGATGTATACGCGGTTGACGGACCGAC
AAGTCTCTATCACCAAGCCAATAAGGGAGTTAGAGTCGCCTACTGGATAGGCTTTGACACCACCCC
TTTTATGTTTAAGAACTTGGCTGGAGCATATCCATCATACTCTACCAACTGGGCCGACGAAACCGT
GTTAACGGCTCGTAACATAGGCCTATGCAGCTCTGACGTTATGGAGCGGTCACGTAGAGGGATGTC
CATTCTTAGAAAGAAGTATTTGAAACCATCCAACAATGTTCTATTCTCTGTTGGCTCGACCATCTAC
CACGAGAAGAGGGACTTACTGAGGAGCTGGCACCTGCCGTCTGTATTTCACTTACGTGGCAAGCAA
AATTACACATGTCGGTGTGAGACTATAGTTAGTTGCGACGGGTACGTCGTTAAAAGAATAGCTATC
AGTCCAGGCCTGTATGGGAAGCCTTCAGGCTATGCTGCTACGATGCACCGCGAGGGATTCTTGTGC
TGCAAAGTGACAGACACATTGAACGGGGAGAGGGTCTCTTTTCCCGTGTGCACGTATGTGCCAGCT
ACATTGTGTGACCAAATGACTGGCATACTGGCAACAGATGTCAGTGCGGACGACGCGCAAAAACT
GCTGGTTGGGCTCAACCAGCGTATAGTCGTCAACGGTCGCACCCAGAGAAACACCAATACCATGA
AAAATTACCTTTTGCCCGTAGTGGCCCAGGCATTTGCTAGGTGGGCAAAGGAATATAAGGAAGATC
AAGAAGATGAAAGGCCACTAGGACTACGAGATAGACAGTTAGTCATGGGGTGTTGTTGGGCTTTT
AGAAGGCACAAGATAACATCTATTTATAAGCGCCCGGATACCCAAACCATCATCAAAGTGAACAG
CGATTTCCACTCATTCGTGCTGCCCAGGATAGGCAGTAACACATTGGAGATCGGGCTGAGAACAAG
AATCAGGAAAATGTTAGAGGAGCACAAGGAGCCGTCACCTCTCATTACCGCCGAGGACGTACAAG
AAGCTAAGTGCGCAGCCGATGAGGCTAAGGAGGTGCGTGAAGCCGAGGAGTTGCGCGCAGCTCTA
CCACCTTTGGCAGCTGATGTTGAGGAGCCCACTCTGGAAGCCGATGTCGACTTGATGTTACAAGAG
GCTGGGGCCGGCTCAGTGGAGACACCTCGTGGCTTGATAAAGGTTACCAGCTACGATGGCGAGGA
CAAGATCGGCTCTTACGCTGTGCTTTCTCCGCAGGCTGTACTCAAGAGTGAAAAATTATCTTGCATC
CACCCTCTCGCTGAACAAGTCATAGTGATAACACACTCTGGCCGAAAAGGGCGTTATGCCGTGGAA
CCATACCATGGTAAAGTAGTGGTGCCAGAGGGACATGCAATACCCGTCCAGGACTTTCAAGCTCTG
AGTGAAAGTGCCACCATTGTGTACAACGAACGTGAGTTCGTAAACAGGTACCTGCACCATATTGCC
ACACATGGAGGAGCGCTGAACACTGATGAAGAATATTACAAAACTGTCAAGCCCAGCGAGCACGA
CGGCGAATACCTGTACGACATCGACAGGAAACAGTGCGTCAAGAAAGAACTAGTCACTGGGCTAG
GGCTCACAGGCGAGCTGGTGGATCCTCCCTTCCATGAATTCGCCTACGAGAGTCTGAGAACACGAC
CAGCCGCTCCTTACCAAGTACCAACCATAGGGGTGTATGGCGTGCCAGGATCAGGCAAGTCTGGC
ATCATTAAAAGCGCAGTCACCAAAAAAGATCTAGTGGTGAGCGCCAAGAAAGAAAACTGTGCAGA
AATTATAAGGGACGTCAAGAAAATGAAAGGGCTGGACGTCAATGCCAGAACTGTGGACTCAGTGC
TCTTGAATGGATGCAAACACCCCGTAGAGACCCTGTATATTGACGAAGCTTTTGCTTGTCATGCAG
GTACTCTCAGAGCGCTCATAGCCATTATAAGACCTAAAAAGGCAGTGCTCTGCGGGGATCCCAAAC
AGTGCGGTTTTTTTAACATGATGTGCCTGAAAGTGCATTTTAACCACGAGATTTGCACACAAGTCTT
CCACAAAAGCATCTCTCGCCGTTGCACTAAATCTGTGACTTCGGTCGTCTCAACCTTGTTTTACGAC
AAAAAAATGAGAACGACGAATCCGAAAGAGACTAAGATTGTGATTGACACTACCGGCAGTACCAA
ACCTAAGCAGGACGATCTCATTCTCACTTGTTTCAGAGGGTGGGTGAAGCAGTTGCAAATAGATTA
CAAAGGCAACGAAATAATGACGGCAGCTGCCTCTCAAGGGCTGACCCGTAAAGGTGTGTATGCCG
TTCGGTACAAGGTGAATGAAAATCCTCTGTACGCACCCACCTCAGAACATGTGAACGTCCTACTGA
CCCGCACGGAGGACCGCATCGTGTGGAAAACACTAGCCGGCGACCCATGGATAAAAACACTGACT
GCCAAGTACCCTGGGAATTTCACTGCCACGATAGAGGAGTGGCAAGCAGAGCATGATGCCATCAT
GAGGCACATCTTGGAGAGACCGGACCCTACCGACGTCTTCCAGAATAAGGCAAACGTGTGTTGGG
CCAAGGCTTTAGTGCCGGTGCTGAAGACCGCTGGCATAGACATGACCACTGAACAATGGAACACT
GTGGATTATTTTGAAACGGACAAAGCTCACTCAGCAGAGATAGTATTGAACCAACTATGCGTGAG
GTTCTTTGGACTCGATCTGGACTCCGGTCTATTTTCTGCACCCACTGTTCCGTTATCCATTAGGAAT
AATCACTGGGATAACTCCCCGTCGCCTAACATGTACGGGCTGAATAAAGAAGTGGTCCGTCAGCTC
TCTCGCAGGTACCCACAACTGCCTCGGGCAGTTGCCACTGGAAGAGTCTATGACATGAACACTGGT
ACACTGCGCAATTATGATCCGCGCATAAACCTAGTACCTGTAAACAGAAGACTGCCTCATGCTTTA
GTCCTCCACCATAATGAACACCCACAGAGTGACTTTTCTTCATTCGTCAGCAAATTGAAGGGCAGA
ACTGTCCTGGTGGTCGGGGAAAAGTTGTCCGTCCCAGGCAAAATGGTTGACTGGTTGTCAGACCGG
CCTGAGGCTACCTTCAGAGCTCGGCTGGATTTAGGCATCCCAGGTGATGTGCCCAAATATGACATA
ATATTTGTTAATGTGAGGACCCCATATAAATACCATCACTATCAGCAGTGTGAAGACCATGCCATT
AAGCTTAGCATGTTGACCAAGAAAGCTTGTCTGCATCTGAATCCCGGCGGAACCTGTGTCAGCATA
GGTTATGGTTACGCTGACAGGGCCAGCGAAAGCATCATTGGTGCTATAGCGCGGCAGTTCAAGTTT
TCCCGGGTATGCAAACCGAAATCCTCACTTGAAGAGACGGAAGTTCTGTTTGTATTCATTGGGTAC
GATCGCAAGGCCCGTACGCACAATCCTTACAAGCTTTCATCAACCTTGACCAACATTTATACAGGT
TCCAGACTCCACGAAGCCGGATGTGCACCCTCATATCATGTGGTGCGAGGGGATATTGCCACGGCC
ACCGAAGGAGTGATTATAAATGCTGCTAACAGCAAAGGACAACCTGGCGGAGGGGTGTGCGGAGC
GCTGTATAAGAAATTCCCGGAAAGCTTCGATTTACAGCCGATCGAAGTAGGAAAAGCGCGACTGG
TCAAAGGTGCAGCTAAACATATCATTCATGCCGTAGGACCAAACTTCAACAAAGTTTCGGAGGTTG
AAGGTGACAAACAGTTGGCAGAGGCTTATGAGTCCATCGCTAAGATTGTCAACGATAACAATTAC
AAGTCAGTAGCGATTCCACTGTTGTCCACCGGCATCTTTTCCGGGAACAAAGATCGACTAACCCAA
TCATTGAACCATTTGCTGACAGCTTTAGACACCACTGATGCAGATGTAGCCATATACTGCAGGGAC
AAGAAATGGGAAATGACTCTCAAGGAAGCAGTGGCTAGGAGAGAAGCAGTGGAGGAGATATGCA
TATCCGACGACTCTTCAGTGACAGAACCTGATGCAGAGCTGGTGAGGGTGCATCCGAAGAGTTCTT
TGGCTGGAAGGAAGGGCTACAGCACAAGCGATGGCAAAACTTTCTCATATTTGGAAGGGACCAAG
TTTCACCAGGCGGCCAAGGATATAGCAGAAATTAATGCCATGTGGCCCGTTGCAACGGAGGCCAA
TGAGCAGGTATGCATGTATATCCTCGGAGAAAGCATGAGCAGTATTAGGTCGAAATGCCCCGTCG
AAGAGTCGGAAGCCTCCACACCACCTAGCACGCTGCCTTGCTTGTGCATCCATGCCATGACTCCAG
AAAGAGTACAGCGCCTAAAAGCCTCACGTCCAGAACAAATTACTGTGTGCTCATCCTTTCCATTGC
CGAAGTATAGAATCACTGGTGTGCAGAAGATCCAATGCTCCCAGCCTATATTGTTCTCACCGAAAG
TGCCTGCGTATATTCATCCAAGGAAGTATCTCGTGGAAACACCACCGGTAGACGAGACTCCGGAGC
CATCGGCAGAGAACCAATCCACAGAGGGGACACCTGAACAACCACCACTTATAACCGAGGATGAG
ACCAGGACTAGAACGCCTGAGCCGATCATCATCGAAGAGGAAGAAGAGGATAGCATAAGTTTGCT
GTCAGATGGCCCGACCCACCAGGTGCTGCAAGTCGAGGCAGACATTCACGGGCCGCCCTCTGTATC
TAGCTCATCCTGGTCCATTCCTCATGCATCCGACTTTGATGTGGACAGTTTATCCATACTTGACACC
CTGGAGGGAGCTAGCGTGACCAGCGGGGCAACGTCAGCCGAGACTAACTCTTACTTCGCAAAGAG
TATGGAGTTTCTGGCGCGACCGGTGCCTGCGCCTCGAACAGTATTCAGGAACCCTCCACATCCCGC
TCCGCGCACAAGAACACCGTCACTTGCACCCAGCAGGGCCTGCTCGAGAACCAGCCTAGTTTCCAC
CCCGCCAGGCGTGAATAGGGTGATCACTAGAGAGGAGCTCGAGGCGCTTACCCCGTCACGCACTC
CTAGCAGGTCGGTCTCGAGAACCAGCCTGGTCTCCAACCCGCCAGGCGTAAATAGGGTGATTACA
AGAGAGGAGTTTGAGGCGTTCGTAGCACAACAACAATGACGGTTTGATGCGGGTGCATACATCTTT
TCCTCCGACACCGGTCAAGGGCATTTACAACAAAAATCAGTAAGGCAAACGGTGCTATCCGAAGT
GGTGTTGGAGAGGACCGAATTGGAGATTTCGTATGCCCCGCGCCTCGACCAAGAAAAAGAAGAAT
TACTACGCAAGAAATTACAGTTAAATCCCACACCTGCTAACAGAAGCAGATACCAGTCCAGGAAG
GTGGAGAACATGAAAGCCATAACAGCTAGACGTATTCTGCAAGGCCTAGGGCATTATTTGAAGGC
AGAAGGAAAAGTGGAGTGCTACCGAACCCTGCATCCTGTTCCTTTGTATTCATCTAGTGTGAACCG
TGCCTTTTCAAGCCCCAAGGTCGCAGTGGAAGCCTGTAACGCCATGTTGAAAGAGAACTTTCCGAC
TGTGGCTTCTTACTGTATTATTCCAGAGTACGATGCCTATTTGGACATGGTTGACGGAGCTTCATGC
TGCTTAGACACTGCCAGTTTTTGCCCTGCAAAGCTGCGCAGCTTTCCAAAGAAACACTCCTATTTGG
AACCCACAATACGATCGGCAGTGCCTTCAGCGATCCAGAACACGCTCCAGAACGTCCTGGCAGCT
GCCACAAAAAGAAATTGCAATGTCACGCAAATGAGAGAATTGCCCGTATTGGATTCGGCGGCCTTT
AATGTGGAATGCTTCAAGAAATATGCGTGTAATAATGAATATTGGGAAACGTTTAAAGAAAACCC
CATCAGGCTTACTGAAGAAAACGTGGTAAATTACATTACCAAATTAAAAGGACCAAAAGCTGCTG
CTCTTTTTGCGAAGACACATAATTTGAATATGTTGCAGGACATACCAATGGACAGGTTTGTAATGG
ACTTAAAGAGAGACGTGAAAGTGACTCCAGGAACAAAACATACTGAAGAACGGCCCAAGGTACA
GGTGATCCAGGCTGCCGATCCGCTAGCAACAGCGTATCTGTGCGGAATCCACCGAGAGCTGGTTAG
GAGATTAAATGCGGTCCTGCTTCCGAACATTCATACACTGTTTGATATGTCGGCTGAAGACTTTGA
CGCTATTATAGCCGAGCACTTCCAGCCTGGGGATTGTGTTCTGGAAACTGACATCGCGTCGTTTGA
TAAAAGTGAGGACGACGCCATGGCTCTGACCGCGTTAATGATTCTGGAAGACTTAGGTGTGGACG
CAGAGCTGTTGACGCTGATTGAGGCGGCTTTCGGCGAAATTTCATCAATACATTTGCCCACTAAAA
CTAAATTTAAATTCGGAGCCATGATGAAATCTGGAATGTTCCTCACACTGTTTGTGAACACAGTCA
TTAACATTGTAATCGCAAGCAGAGTGTTGAGAGAACGGCTAACCGGATCACCATGTGCAGCATTCA
TTGGAGATGACAATATCGTGAAAGGAGTCAAATCGGACAAATTAATGGCAGACAGGTGCGCCACC
TGGTTGAATATGGAAGTCAAGATTATAGATGCTGTGGTGGGCGAGAAAGCGCCTTATTTCTGTGGA
GGGTTTATTTTGTGTGACTCCGTGACCGGCACAGCGTGCCGTGTGGCAGACCCCCTAAAAAGGCTG
TTTAAGCTTGGCAAACCTCTGGCAGCAGACGATGAACATGATGATGACAGGAGAAGGGCATTGCA
TGAAGAGTCAACACGCTGGAACCGAGTGGGTATTCTTTCAGAGCTGTGCAAGGCAGTAGAATCAA
GGTATGAAACCGTAGGAACTTCCATCATAGTTATGGCCATGACTACTCTAGCTAGCAGTGTTAAAT
CATTCAGCTACCTGAGAGGGGCCCCTATAACTCTCTACGGCTAACCTGAATGGACTACGACGTATC
ACGCCCAAACATTTACAGCCGCGGTGTCAAAAACCGCGTGGACGTGGTTAACATCCCTGCTGGGA
GGATCAGCCGTAATTATTATAATTGGCTTGGTGCTGGCTACTATTGTGGCCATGTACGTGCTGACCA
ACCAGAAACATAATTGAATACAGCAGCAATTGGCAAGCTGCTTACATAGAACTCGCGGCGATTGG
CATGCCGCCTTAAAATTTTTATTTTATTTTTCTTTTCTTTTCCGAATCGGATTTTGTTTTTAATATTTC
AAAAAAAAAAAAAAAAAAAAAAAAAAAAAAAAAAAAAAAAAAAAAAAAAAAAAAAAAAAAAA
AAAAAAAAAAAAAAAAAA
VEE-UbAAY (SEQ ID NO: 14); VEE delivery vector with MHC class I mouse tumor epitopes SIINFEKL (SEQ
ID NO: 129) and AH1-A5 inserted
VEE-Luciferase (SEQ ID NO: 15); VEE delivery vector with luciferase gene inserted at 7545
ubiquitin (SEQ ID NO: 38) >UbG76 0-228
Ubiquitin A76 (SEQ ID NO: 39) >UbA76 0-228
HLA-A2 (MHC class I) signal peptide (SEQ ID NO: 40) >MHC SignalPep 0-78
HLA-A2 (MHC class I) Trans Membrane domain (SEQ ID NO: 41) >HLA A2 TM Domain 0-201
IgK Leader Seq (SEQ ID NO: 42) >IgK Leader Seq 0-60
Human DC-Lamp (SEQ ID NO: 43) >HumanDCLAMP 0-3178
Mouse LAMP1 (SEQ ID NO: 44) >MouseLamp1 0-1858
Human Lamp1 cDNA (SEQ ID NO: 45) >Human Lamp1 0-2339
Tetanus toxoid nulceic acid sequence (SEQ ID NO: 46)
Tetanus toxoid amino acid sequence (SEQ ID NO: 47)
PADRE nulceotide sequence (SEQ ID NO: 48)
PADRE amino acid sequence (SEQ ID NO: 49)
WPRE (SEQ ID NO: 50) >WPRE 0-593
IRES (SEQ ID NO: 51) >eGFP_IRES_SEAP_Insert 1746-2335
GFP (SEQ ID NO: 52)
SEAP (SEQ ID NO: 53)
Firefly Luciferase (SEQ ID NO: 54)
FMDV 2A (SEQ ID NO: 55)
GPGPG linker (SEQ ID NO: 56)
chAd68-Empty-E4deleted (SEQ ID NO: 75): AC_000011.1 with E1 (nt 577 to 3403), E3 (nt 27,125- 31,825),
and E4 region (nt 34,916 to 35,642) sequences deleted and the corresponding ATCC VR-594 (Independently
sequenced Full-Length VR-594 C68 SEQ ID NO: 10) nucleotides substituted at five positions
NC_045512.2 Severe acute respiratory syndrome coronavirus 2 isolate Wuhan-Hu-1, complete genome (SEQ ID
NO: 76)
SAM in vitro transcription template DNA (SEQ ID NO: 77); VEE genome with nucleotides 7544-11175 deleted,
plus minimal 5′ T7-promoter
TAATACGACTCACTATAATGggcggcgcatgagagaagcccagaccaattacctacccaaaATGGagaaagttcacgttgacatcgaggaa
gacagcccattcctcagagctttgcagcggagcttcccgcagtttgaggtagaagccaagcaggtcactgataatgaccatgctaatgccagagcgttttcgcatct
ggcttcaaaactgatcgaaacggaggtggacccatccgacacgatccttgacattggaagtgcgcccgcccgcagaatgtattctaagcacaagtatcattgtatct
gtccgatgagatgtgcggaagatccggacagattgtataagtatgcaactaagctgaagaaaaactgtaaggaaataactgataaggaattggacaagaaaatgaa
ggagctcgccgccgtcatgagcgaccctgacctggaaactgagactatgtgcctccacgacgacgagtcgtgtcgctacgaagggcaagtcgctgtttaccagga
tgtatacgcggttgacggaccgacaagtctctatcaccaagccaataagggagttagagtcgcctactggataggctttgacaccaccccttttatgtttaagaacttg
gctggagcatatccatcatactctaccaactgggccgacgaaaccgtgttaacggctcgtaacataggcctatgcagctctgacgttatggagcggtcacgtagag
ggatgtccattcttagaaagaagtatttgaaaccatccaacaatgttctattctctgttggctcgaccatctaccacgagaagagggacttactgaggagctggcacct
gccgtctgtatttcacttacgtggcaagcaaaattacacatgtcggtgtgagactatagttagttgcgacgggtacgtcgttaaaagaatagctatcagtccaggcctgt
atgggaagccttcaggctatgctgctacgatgcaccgcgagggattcttgtgctgcaaagtgacagacacattgaacggggagagggtctcttttcccgtgtgcacg
tatgtgccagctacattgtgtgaccaaatgactggcatactggcaacagatgtcagtgcggacgacgcgcaaaaactgctggttgggctcaaccagcgtatagtcgt
caacggtcgcacccagagaaacaccaataccatgaaaaattaccttttgcccgtagtggcccaggcatttgctaggtgggcaaaggaatataaggaagatcaaga
agatgaaaggccactaggactacgagatagacagttagtcatggggtgttgttgggcttttagaaggcacaagataacatctatttataagcgcccggatacccaaa
ccatcatcaaagtgaacagcgatttccactcattcgtgctgcccaggataggcagtaacacattggagatcgggctgagaacaagaatcaggaaaatgttagagga
gcacaaggagccgtcacctctcattaccgccgaggacgtacaagaagctaagtgcgcagccgatgaggctaaggaggtgcgtgaagccgaggagttgcgcgc
agctctaccacctttggcagctgatgttgaggagcccactctggaagccgatgtcgacttgatgttacaagaggctggggccggctcagtggagacacctcgtggc
ttgataaaggttaccagctacgctggcgaggacaagatcggctcttacgctgtgctttctccgcaggctgtactcaagagtgaaaaattatcttgcatccaccctctcg
ctgaacaagtcatagtgataacacactctggccgaaaagggcgttatgccgtggaaccataccatggtaaagtagtggtgccagagggacatgcaatacccgtcc
aggactttcaagctctgagtgaaagtgccaccattgtgtacaacgaacgtgagttcgtaaacaggtacctgcaccatattgccacacatggaggagcgctgaacact
gatgaagaatattacaaaactgtcaagcccagcgagcacgacggcgaatacctgtacgacatcgacaggaaacagtgcgtcaagaaagaactagtcactgggct
agggctcacaggcgagctggtggatcctcccttccatgaattcgcctacgagagtctgagaacacgaccagccgctccttaccaagtaccaaccataggggtgtat
ggcgtgccaggatcaggcaagtctggcatcattaaaagcgcagtcaccaaaaaagatctagtggtgagcgccaagaaagaaaactgtgcagaaattataaggga
cgtcaagaaaatgaaagggctggacgtcaatgccagaactgtggactcagtgctcttgaatggatgcaaacaccccgtagagaccctgtatattgacgaagcttttg
cttgtcatgcaggtactctcagagcgctcatagccattataagacctaaaaaggcagtgctctgcggggatcccaaacagtgcggtttttttaacatgatgtgcctgaa
agtgcattttaaccacgagatttgcacacaagtcttccacaaaagcatctctcgccgttgcactaaatctgtgacttcggtcgtctcaaccttgttttacgacaaaaaaat
gagaacgacgaatccgaaagagactaagattgtgattgacactaccggcagtaccaaacctaagcaggacgatctcattctcacttgtttcagagggtgggtgaag
cagttgcaaatagattacaaaggcaacgaaataatgacggcagctgcctctcaagggctgacccgtaaaggtgtgtatgccgttcggtacaaggtgaatgaaaatc
ctctgtacgcacccacctcagaacatgtgaacgtcctactgacccgcacggaggaccgcatcgtgtggaaaacactagccggcgacccatggataaaaacactg
actgccaagtaccctgggaatttcactgccacgatagaggagtggcaagcagagcatgatgccatcatgaggcacatcttggagagaccggaccctaccgacgtc
ttccagaataaggcaaacgtgtgttgggccaaggctttagtgccggtgctgaagaccgctggcatagacatgaccactgaacaatggaacactgtggattattttga
aacggacaaagctcactcagcagagatagtattgaaccaactatgcgtgaggttctttggactcgatctggactccggtctattttctgcacccactgttccgttatccat
taggaataatcactgggataactccccgtcgcctaacatgtacgggctgaataaagaagtggtccgtcagctctctcgcaggtacccacaactgcctcgggcagttg
ccactggaagagtctatgacatgaacactggtacactgcgcaattatgatccgcgcataaacctagtacctgtaaacagaagactgcctcatgctttagtcctccacc
ataatgaacacccacagagtgacttttcttcattcgtcagcaaattgaagggcagaactgtcctggtggtcggggaaaagttgtccgtcccaggcaaaatggttgact
ggttgtcagaccggcctgaggctaccttcagagctcggctggatttaggcatcccaggtgatgtgcccaaatatgacataatatttgttaatgtgaggaccccatataa
ataccatcactatcagcagtgtgaagaccatgccattaagcttagcatgttgaccaagaaagcttgtctgcatctgaatcccggcggaacctgtgtcagcataggttat
ggttacgctgacagggccagcgaaagcatcattggtgctatagcgcggcagttcaagttttcccgggtatgcaaaccgaaatcctcacttgaagagacggaagttct
gtttgtattcattgggtacgatcgcaaggcccgtacgcacaatccttacaagctttcatcaaccttgaccaacatttatacaggttccagactccacgaagccggatgtg
caccctcatatcatgtggtgcgaggggatattgccacggccaccgaaggagtgattataaatgctgctaacagcaaaggacaacctggcggaggggtgtgcgga
gcgctgtataagaaattcccggaaagcttcgatttacagccgatcgaagtaggaaaagcgcgactggtcaaaggtgcagctaaacatatcattcatgccgtaggac
caaacttcaacaaagtttcggaggttgaaggtgacaaacagttggcagaggcttatgagtccatcgctaagattgtcaacgataacaattacaagtcagtagcgattc
cactgttgtccaccggcatcttttccgggaacaaagatcgactaacccaatcattgaaccatttgctgacagctttagacaccactgatgcagatgtagccatatactg
cagggacaagaaatgggaaatgactctcaaggaagcagtggctaggagagaagcagtggaggagatatgcatatccgacgactcttcagtgacagaacctgatg
cagagctggtgagggtgcatccgaagagttctttggctggaaggaagggctacagcacaagcgatggcaaaactttctcatatttggaagggaccaagtttcacca
ggcggccaaggatatagcagaaattaatgccatgtggcccgttgcaacggaggccaatgagcaggtatgcatgtatatcctcggagaaagcatgagcagtattag
gtcgaaatgccccgtcgaagagtcggaagcctccacaccacctagcacgctgccttgcttgtgcatccatgccatgactccagaaagagtacagcgcctaaaagc
ctcacgtccagaacaaattactgtgtgctcatcctttccattgccgaagtatagaatcactggtgtgcagaagatccaatgctcccagcctatattgttctcaccgaaagt
gcctgcgtatattcatccaaggaagtatctcgtggaaacaccaccggtagacgagactccggagccatcggcagagaaccaatccacagaggggacacctgaac
aaccaccacttataaccgaggatgagaccaggactagaacgcctgagccgatcatcatcgaagaggaagaagaggatagcataagtttgctgtcagatggcccg
acccaccaggtgctgcaagtcgaggcagacattcacgggccgccctctgtatctagctcatcctggtccattcctcatgcatccgactttgatgtggacagtttatcca
tacttgacaccctggagggagctagcgtgaccagcggggcaacgtcagccgagactaactcttacttcgcaaagagtatggagtttctggcgcgaccggtgcctg
cgcctcgaacagtattcaggaaccctccacatcccgctccgcgcacaagaacaccgtcacttgcacccagcagggcctgctcgagaaccagcctagtttccaccc
cgccaggcgtgaatagggtgatcactagagaggagctcgaggcgcttaccccgtcacgcactcctagcaggtcggtctcgagaaccagcctggtctccaacccg
ccaggcgtaaatagggtgattacaagagaggagtttgaggcgttcgtagcacaacaacaatgacggtttgatgcgggtgcatacatcttttcctccgacaccggtca
agggcatttacaacaaaaatcagtaaggcaaacggtgctatccgaagtggtgttggagaggaccgaattggagatttcgtatgccccgcgcctcgaccaagaaaa
agaagaattactacgcaagaaattacagttaaatcccacacctgctaacagaagcagataccagtccaggaaggtggagaacatgaaagccataacagctagacg
tattctgcaaggcctagggcattatttgaaggcagaaggaaaagtggagtgctaccgaaccctgcatcctgttcctttgtattcatctagtgtgaaccgtgccttttcaa
gccccaaggtcgcagtggaagcctgtaacgccatgttgaaagagaactttccgactgtggcttcttactgtattattccagagtacgatgcctatttggacatggttgac
ggagcttcatgctgcttagacactgccagtttttgccctgcaaagctgcgcagctttccaaagaaacactcctatttggaacccacaatacgatcggcagtgccttcag
cgatccagaacacgctccagaacgtcctggcagctgccacaaaaagaaattgcaatgtcacgcaaatgagagaattgcccgtattggattcggcggcctttaatgt
ggaatgcttcaagaaatatgcgtgtaataatgaatattgggaaacgtttaaagaaaaccccatcaggcttactgaagaaaacgtggtaaattacattaccaaattaaaa
ggaccaaaagctgctgctctttttgcgaagacacataatttgaatatgttgcaggacataccaatggacaggtttgtaatggacttaaagagagacgtgaaagtgactc
caggaacaaaacatactgaagaacggcccaaggtacaggtgatccaggctgccgatccgctagcaacagcgtatctgtgcggaatccaccgagagctggttagg
agattaaatgcggtcctgcttccgaacattcatacactgtttgatatgtcggctgaagactttgacgctattatagccgagcacttccagcctggggattgtgttctggaa
actgacatcgcgtcgtttgataaaagtgaggacgacgccatggctctgaccgcgttaatgattctggaagacttaggtgtggacgcagagctgttgacgctgattga
ggcggctttcggcgaaatttcatcaatacatttgcccactaaaactaaatttaaattcggagccatgatgaaatctggaatgttcctcacactgtttgtgaacacagtcatt
aacattgtaatcgcaagcagagtgttgagagaacggctaaccggatcaccatgtgcagcattcattggagatgacaatatcgtgaaaggagtcaaatcggacaaatt
aatggcagacaggtgcgccacctggttgaatatggaagtcaagattatagatgctgtggtgggcgagaaagcgccttatttctgtggagggtttattttgtgtgactcc
gtgaccggcacagcgtgccgtgtggcagaccccctaaaaaggctgtttaagcttggcaaacctctggcagcagacgatgaacatgatgatgacaggagaagggc
attgcatgaagagtcaacacgctggaaccgagtgggtattctttcagagctgtgcaaggcagtagaatcaaggtatgaaaccgtaggaacttccatcatagttatggc
catgactactctagctagcagtgttaaatcattcagctacctgagaggggcccctataactctctacggcTAAcctgaatggactacgacgTatcacgcccaaac
atttacagccgcggtgtcaaaaaccgcgtggacgtggttaacatccctgctgggaggatcagccgtaattattataattggcttggtgctggctactattgtggccatgt
acgtgctgaccaaccagaaacataattgaatacagcagcaattggcaagctgcttacatagaactcgcggcgattggcatgccgccttaaaatttttattttattttttctt
ttcttttccgaatcggattttgtttttaatatttcAAAAAAAAAAAAAAAAAAAAAAAAAAAAAAAAAAAAAAAAAAAAA
AAAAAAAAAAAAAAAAAAAAAAAAAAAAAAAAAAA
SV40 mini-intron (SEQ ID NO: 88)
CMV-CTSpike-FurinMT2P-T2A-E-T2A-M-SV40-CMV-EPE-BGH Nucleotide sequence
(SEQ ID NO: 109)
VOC 202012/01 B.1.1.7 UK Spike variant Amino Acid Sequence (SEQ ID NO: 110)
MFVFLVLLPLVSSQCVNLTTRTQLPPAYTNSFTRGVYYPDKVFRSSVLHSTQDLFLPF
FSNVTWFHAISGTNGTKRFDNPVLPFNDGVYFASTEKSNIIRGWIFGTTLDSKTQSLLI
VNNATNVVIKVCEFQFCNDPFLGVYHKNNKSWMESEFRVYSSANNCTFEYVSQPFL
MDLEGKQGNFKNLREFVFKNIDGYFKIYSKHTPINLVRDLPQGFSALEPLVDLPIGINI
TRFQTLLALHRSYLTPGDSSSGWTAGAAAYYVGYLQPRTFLLKYNENGTITDAVDC
ALDPLSETKCTLKSFTVEKGIYQTSNFRVQPTESIVRFPNITNLCPFGEVFNATRFASV
YAWNRKRISNCVADYSVLYNSASFSTFKCYGVSPTKLNDLCFTNVYADSFVIRGDEV
RQIAPGQTGKIADYNYKLPDDFTGCVIAWNSNNLDSKVGGNYNYLYRLFRKSNLKPF
ERDISTEIYQAGSTPCNGVEGENCYFPLQSYGFQPTYGVGYQPYRVVVLSFELLHAPA
TVCGPKKSTNLVKNKCVNFNFNGLTGTGVLTESNKKFLPFQQFGRDIDDTTDAVRDP
QTLEILDITPCSFGGVSVITPGTNTSNQVAVLYQGVNCTEVPVAIHADQLTPTWRVYS
TGSNVFQTRAGCLIGAEHVNNSYECDIPIGAGICASYQTQTNSHGSASSVASQSIIAYT
MSLGAENSVAYSNNSIAIPINFTISVTTEILPVSMTKTSVDCTMYICGDSTECSNLLLQY
GSFCTQLNRALTGIA VEQDKNTQEVFAQVKQIYKTPPIKDFGGFNFSQILPDPSKPSKR
SFIEDLLFNKVTLADAGFIKQYGDCLGDIAARDLICAQKFNGLTVLPPLLTDEMIAQY
TSALLAGTITSGWTFGAGAALQIPFAMQMAYRENGIGVTQNVLYENQKLIANQFNSA
IGKIQDSLSSTASALGKLQDVVNQNAQALNTLVKQLSSNFGAISSVLNDILARLDPPE
AEVQIDRLITGRLQSLQTYVTQQLIRAAEIRASANLAATKMSECVLGQSKRVDFCGK
GYHLMSFPQSAPHGVVFLHVTYVPAQEKNFTTAPAICHDGKAHFPREGVFVSNGTH
WFVTQRNFYEPQIITTHNTFVSGNCDVVIGIVNNTVYDPLQPELDSFKEELDKYFKNH
TSPDVDLGDISGINASVVNIQKEIDRLNEVAKNLNESLIDLQELGKYEQYIKWPWYIW
LGFIAGLIAIVMVTIMLCCMTSCCSCLKGCCSCGSCCKFDEDDSEPVLKGVKLHYT*
CMV-B117Spike-FurinMT2P-SV40-CMV-EPE-BGH (SEQ ID NO: 111)
B.1.351Spike-FurinMt Amino Acid sequence (South African Spike Variant) (SEQ ID
NO: 112)
MFVFLVLLPLVSSQCVNFTTRTQLPPAYTNSFTRGVYYPDKVFRSSVLHSTQDLFLPFFSNVTWFHAIHV
SGTNGTKRFANPVLPFNDGVYFASTEKSNIIRGWIFGTTLDSKTQSLLIVNNATNVVIKVCEFQFCNDPF
LGVYYHKNNKSWMESEFRVYSSANNCTFEYVSQPFLMDLEGKQGNFKNLREFVFKNIDGYFKIYSKHT
PINLVRGLPQGFSALEPLVDLPIGINITRFQTLHISYLTPGDSSSGWTAGAAAYYVGYLQPRTFLLKYNEN
GTITDAVDCALDPLSETKCTLKSFTVEKGIYQTSNFRVQPTESIVRFPNITNLCPFGEVENATRFASVYAW
NRKRISNCVADYSVLYNSASFSTFKCYGVSPTKLNDLCFTNVYADSFVIRGDEVRQIAPGQTGNIADYN
YKLPDDFTGCVIAWNSNNLDSKVGGNYNYLYRLFRKSNLKPFERDISTEIYQAGSTPCNGVKGENCYFP
LQSYGFQPTYGVGYQPYRVVVLSFELLHAPATVCGPKKSTNLVKNKCVNFNFNGLTGTGVLTESNKKF
LPFQQFGRDIADTTDAVRDPQTLEILDITPCSFGGVSVITPGTNTSNQVAVLYQGVNCTEVPVAIHADQL
TPTWRVYSTGSNVFQTRAGCLIGAEHVNNSYECDIPIGAGICASYQTQTNSPGSASSVASQSIIAYTMSL
GVENSVAYSNNSIAIPTNFTISVTTEILPVSMTKTSVDCTMYICGDSTECSNLLLQYGSFCTQLNRALTGI
AVEQDKNTQEVFAQVKQIYKTPPIKDFGGFNFSQILPDPSKPSKRSFIEDLLFNKVTLADAGFIKQYGDC
LGDIAARDLICAQKFNGLTVLPPLLTDEMIAQYTSALLAGTITSGWTFGAGAALQIPFAMQMAYRENGI
GVTQNVLYENQKLIANQFNSAIGKIQDSLSSTASALGKLQDVVNQNAQALNTLVKQLSSNFGAISSVLN
DILSRLDPPEAEVQIDRLITGRLQSLQTYVTQQLIRAAEIRASANLAATKMSECVLGQSKRVDFCGKGYH
LMSFPQSAPHGVVFLHVTYVPAQEKNFTTAPAICHDGKAHFPREGVFVSNGTHWFVTQRNFYEPQIITT
DNTFVSGNCDVVIGIVNNTVYDPLQPELDSFKEELDKYFKNHTSPDVDLGDISGINASVVNIQKEIDRLN
EVAKNLNESLIDLQELGKYEQYIKWPWYIWLGFIAGLIAIVMVTIMLCCMTSCCSCLKGCCSCGSCCKF
DEDDSEPVLKGVKLHYT
CMV-B.1351Spike-FurinMt-2P-CMV-TCE5-BGH (SEQ ID NO: 113); B.1.351 Spike
sequence based on CT1 sequence optimization with relevant variant mutations replaced with
COOL codons

### REFERENCES

[0659] 1. Desrichard, A., Snyder, A. & Chan, T. A. Cancer Neoantigens and Applications for Immunotherapy. Clin. Cancer Res. Off. J. Am. Assoc. Cancer Res. (2015). doi: 10.1158/1078-0432.CCR-14-3175
[0660] 2. Schumacher, T. N. & Schreiber, R. D. Neoantigens in cancer immunotherapy. Science 348, 69-74 (2015).
[0661] 3. Gubin, M. M., Artyomov, M. N., Mardis, E. R. & Schreiber, R. D. Tumor neoantigens: building a framework for personalized cancer immunotherapy. J. Clin. Invest. 125, 3413-3421 (2015).
[0662] 4. Rizvi, N. A. et al. Cancer immunology. Mutational landscape determines sensitivity to PD-1 blockade in non-small cell lung cancer. Science 348, 124-128 (2015).
[0663] 5. Snyder, A. et al. Genetic basis for clinical response to CTLA-4 blockade in melanoma. N. Engl. J. Med. 371, 2189-2199 (2014).
[0664] 6. Carreno, B. M. et al. Cancer immunotherapy. A dendritic cell vaccine increases the breadth and diversity of melanoma neoantigen-specific T cells. Science 348, 803-808 (2015).
[0665] 7. Tran, E. et al. Cancer immunotherapy based on mutation-specific CD4+ T cells in a patient with epithelial cancer. Science 344, 641-645 (2014).
[0666] 8. Hacohen, N. & Wu, C. J.-Y. United States Patent Application: 20110293637-COMPOSITIONS AND METHODS OF IDENTIFYING TUMOR SPECIFIC NEOANTIGENS. (A1). at <appft1.uspto.gov/netacgi/nph-Parser?Sect1=PTO1&Sect2=HITOFF&d=PG01&p=1&u=/netahtml/PTO/srchnum.html&r=1 &f=G&1=50&s1=20110293637.PGNR.>
[0667] 9. Lundegaard, C., Hoof, I., Lund, O. & Nielsen, M. State of the art and challenges in sequence based T-cell epitope prediction. Immunome Res. 6 Suppl 2, S3 (2010).
[0668] 10. Yadav, M. et al. Predicting immunogenic tumour mutations by combining mass spectrometry and exome sequencing. Nature 515, 572-576 (2014).
[0669] 11. Bassani-Sternberg, M., Pletscher-Frankild, S., Jensen, L. J. & Mann, M. Mass spectrometry of human leukocyte antigen class I peptidomes reveals strong effects of protein abundance and turnover on antigen presentation. Mol. Cell. Proteomics MCP 14, 658-673 (2015).
[0670] 12. Van Allen, E. M. et al. Genomic correlates of response to CTLA-4 blockade in metastatic melanoma. Science 350, 207-211 (2015).
[0671] 13. Yoshida, K. & Ogawa, S. Splicing factor mutations and cancer. Wiley Interdiscip. Rev. RNA 5, 445-459 (2014).
[0672] 14. Cancer Genome Atlas Research Network. Comprehensive molecular profiling of lung adenocarcinoma. Nature 511, 543-550 (2014).
[0673] 15. Rajasagi, M. et al. Systematic identification of personal tumor-specific neoantigens in chronic lymphocytic leukemia. Blood 124, 453-462 (2014).
[0674] 16. Downing, S. R. et al. U.S. patent application Ser. No. 01/202,08706-OPTIMIZATION OF MULTIGENE ANALYSIS OF TUMOR SAMPLES. (A1). at <appft 1.uspto.gov/nctacgi/nph-Parser?Sect1=PTO1&Sect2=HITOFF&d=PG01&p=1&u=/nctahtml/PTO/srchnum.html&r=1&f=G&1=50&s1=20120208706.PGNR.>
[0675] 17. Target Capture for NextGen Sequencing—IDT. at <www.idtdna.com/pages/products/nextgen/target-capture>
[0676] 18. Shukla, S. A. et al. Comprehensive analysis of cancer-associated somatic mutations in class I HLA genes. Nat. Biotechnol. 33, 1152-1158 (2015).
[0677] 19. Cieslik, M. et al. The use of exome capture RNA-seq for highly degraded RNA with application to clinical cancer sequencing. Genome Res. 25, 1372-1381 (2015).
[0678] 20. Bodini, M. et al. The hidden genomic landscape of acute myeloid leukemia: subclonal structure revealed by undetected mutations. Blood 125, 600-605 (2015).
[0679] 21. Saunders, C. T. et al. Strelka: accurate somatic small-variant calling from sequenced tumor-normal sample pairs. Bioinforma. Oxf. Engl. 28, 1811-1817 (2012).
[0680] 22. Cibulskis, K. et al. Sensitive detection of somatic point mutations in impure and heterogeneous cancer samples. Nat. Biotechnol. 31, 213-219 (2013).
[0681] 23. Wilkerson, M. D. et al. Integrated RNA and DNA sequencing improves mutation detection in low purity tumors. Nucleic Acids Res. 42, c107 (2014).
[0682] 24. Mose, L. E., Wilkerson, M. D., Hayes, D. N., Perou, C. M. & Parker, J. S. ABRA: improved coding indel detection via assembly-based realignment. Bioinforma. Oxf. Engl. 30, 2813-2815 (2014).
[0683] 25. Ye, K., Schulz, M. H., Long, Q., Apweiler, R. & Ning, Z. Pindel: a pattern growth approach to detect break points of large deletions and medium sized insertions from paired-end short reads. Bioinforma. Oxf. Engl. 25, 2865-2871 (2009).
[0684] 26. Lam, H. Y. K. et al. Nucleotide-resolution analysis of structural variants using BreakSeq and a breakpoint library. Nat. Biotechnol. 28, 47-55 (2010).
[0685] 27. Frampton, G. M. et al. Development and validation of a clinical cancer genomic profiling test based on massively parallel DNA sequencing. Nat. Biotechnol. 31, 1023-1031 (2013).
[0686] 28. Boegel, S. et al. HLA typing from RNA-Seq sequence reads. Genome Med. 4, 102 (2012).
[0687] 29. Liu, C. et al. ATHLATES: accurate typing of human leukocyte antigen through exome sequencing. Nucleic Acids Res. 41, c142 (2013).
[0688] 30. Mayor, N. P. et al. HLA Typing for the Next Generation. PloS One 10, c0127153 (2015).
[0689] 31. Roy, C. K., Olson, S., Graveley, B. R., Zamore, P. D. & Moore, M. J. Assessing long-distance RNA sequence connectivity via RNA-templated DNA-DNA ligation. eLife 4, (2015).
[0690] 32. Song, L. & Florea, L. CLASS: constrained transcript assembly of RNA-seq reads. BMC Bioinformatics 14 Suppl 5, S14 (2013).
[0691] 33. Maretty, L., Sibbesen, J. A. & Krogh, A. Bayesian transcriptome assembly. Genome Biol. 15, 501 (2014).
[0692] 34. Pertea, M. et al. StringTie enables improved reconstruction of a transcriptome from RNA-seq reads. Nat. Biotechnol. 33, 290-295 (2015).
[0693] 35. Roberts, A., Pimentel, H., Trapnell, C. & Pachter, L. Identification of novel transcripts in annotated genomes using RNA-Seq. Bioinforma. Oxf. Engl. (2011). doi: 10.1093/bioinformatics/btr355
[0694] 36. Vitting-Seerup, K., Porse, B. T., Sandelin, A. & Waage, J. spliceR: an R package for classification of alternative splicing and prediction of coding potential from RNA-seq data. BMC Bioinformatics 15, 81 (2014).
[0695] 37. Rivas, M. A. et al. Human genomics. Effect of predicted protein-truncating genetic variants on the human transcriptome. Science 348, 666-669 (2015).
[0696] 38. Skelly, D. A., Johansson, M., Madeoy, J., Wakefield, J. & Akey, J. M. A powerful and flexible statistical framework for testing hypotheses of allele-specific gene expression from RNA-seq data. Genome Res. 21, 1728-1737 (2011).
[0697] 39. Anders, S., Pyl, P. T. & Huber, W. HTSeq—a Python framework to work with high-throughput sequencing data. Bioinforma. Oxf. Engl. 31, 166-169 (2015).
[0698] 40. Furney, S. J. et al. SF3B1 mutations are associated with alternative splicing in uveal melanoma. Cancer Discov. (2013). doi: 10.1158/2159-8290.CD-13-0330
[0699] 41. Zhou, Q. et al. A chemical genetics approach for the functional assessment of novel cancer genes. Cancer Res. (2015). doi: 10.1158/0008-5472.CAN-14-2930
[0700] 42. Maguire, S. L. et al. SF3B1 mutations constitute a novel therapeutic target in breast cancer. J. Pathol. 235, 571-580 (2015).
[0701] 43. Carithers, L. J. et al. A Novel Approach to High-Quality Postmortem Tissue Procurement: The GTEx Project. Biopreservation Biobanking 13, 311-319 (2015).
[0702] 44. Xu, G. et al. RNA COMPASS: a dual approach for pathogen and host transcriptome analysis of RNA-seq datasets. PloS One 9, c89445 (2014).
[0703] 45. Andreatta, M. & Nielsen, M. Gapped sequence alignment using artificial neural networks: application to the MHC class I system. Bioinforma. Oxf. Engl. (2015). doi: 10.1093/bioinformatics/btv639
[0704] 46. Jørgensen, K. W., Rasmussen, M., Buus, S. & Nielsen, M. NetMHCstab-predicting stability of peptide-MHC-I complexes; impacts for cytotoxic T lymphocyte epitope discovery. Immunology 141, 18-26 (2014).
[0705] 47. Larsen, M. V. et al. An integrative approach to CTL epitope prediction: a combined algorithm integrating MHC class I binding, TAP transport efficiency, and proteasomal cleavage predictions. Eur. J. Immunol. 35, 2295-2303 (2005).
[0706] 48. Nielsen, M., Lundegaard, C., Lund, O. & Kesmir, C. The role of the proteasome in generating cytotoxic T-cell epitopes: insights obtained from improved predictions of protcasomal cleavage. Immunogenetics 57, 33-41 (2005).
[0707] 49. Boisvert, F.-M. et al. A Quantitative Spatial Proteomics Analysis of Proteome Turnover in Human Cells. Mol. Cell. Proteomics 11, M111.011429-M111.011429 (2012).
[0708] 50. Duan, F. et al. Genomic and bioinformatic profiling of mutational neoepitopes reveals new rules to predict anticancer immunogenicity. J. Exp. Med. 211, 2231-2248 (2014).
[0709] 51. Janeway's Immunobiology: 9780815345312: Medicine & Health Science Books @ Amazon.com. at <www.amazon.com/Janeways-Immunobiology-Kenneth-Murphy/dp/0815345313>
[0710] 52. Calis, J. J. A. et al. Properties of MHC Class I Presented Peptides That Enhance Immunogenicity. PLOS Comput. Biol. 9, e1003266 (2013).
[0711] 53. Zhang, J. et al. Intratumor heterogeneity in localized lung adenocarcinomas delineated by multiregion sequencing. Science 346, 256-259 (2014)
[0712] 54. Walter, M. J. et al. Clonal architecture of secondary acute myeloid leukemia. N. Engl. J. Med. 366, 1090-1098 (2012).
[0713] 55. Hunt D F, Henderson R A, Shabanowitz J, Sakaguchi K, Michel H, Sevilir N, Cox A L, Appella E, Engelhard V H. Characterization of peptides bound to the class I MHC molecule HLA-A2.1 by mass spectrometry. Science 1992. 255: 1261-1263.
[0714] 56. Zarling A L, Polefrone J M, Evans A M, Mikesh L M, Shabanowitz J, Lewis S T, Engelhard V H, Hunt D F. Identification of class I MHC-associated phosphopeptides as targets for cancer immunotherapy. Proc Natl Acad Sci USA. 2006 Oct. 3; 103(40): 14889-94.
[0715] 57. Bassani-Sternberg M, Pletscher-Frankild S, Jensen L J, Mann M. Mass spectrometry of human leukocyte antigen class I peptidomes reveals strong effects of protein abundance and turnover on antigen presentation. Mol Cell Proteomics. 2015 March; 14(3):658-73. doi: 10.1074/mcp.M114.042812.
[0716] 58. Abelin J G, Trantham P D, Penny S A, Patterson A M, Ward S T, Hildebrand W H, Cobbold M, Bai D L, Shabanowitz J, Hunt D F. Complementary IMAC enrichment methods for HLA-associated phosphopeptide identification by mass spectrometry. Nat Protoc. 2015 September; 10(9):1308-18. doi: 10.1038/nprot.2015.086. Epub 2015 Aug. 6
[0717] 59. Barnstable C J, Bodmer W F, Brown G, Galfre G, Milstein C, Williams A F, Ziegler A. Production of monoclonal antibodies to group A erythrocytes, HLA and other human cell surface antigens-new tools for genetic analysis. Cell. 1978 May; 14(1):9-20.
[0718] 60. Goldman J M, Hibbin J, Kearney L, Orchard K, Th'ng KH. HLA-DR monoclonal antibodies inhibit the proliferation of normal and chronic granulocytic leukaemia myeloid progenitor cells. Br J Haematol. 1982 November; 52(3):411-20.
[0719] 61. Eng J K, Jahan T A, Hoopmann M R. Comet: an open-source M S/M S sequence database search tool. Proteomics. 2013 January; 13(1):22-4. doi: 10.1002/pmic.201200439. Epub 2012 Dec. 4.
[0720] 62. Eng J K, Hoopmann M R, Jahan T A, Egertson J D, Noble W S, MacCoss M J. A deeper look into Comet—implementation and features. J Am Soc Mass Spectrom. 2015 November; 26(11): 1865-74. doi: 10.1007/s13361-015-1179-x. Epub 2015 Jun. 27.
[0721] 63. Lukas Kall, Jesse Canterbury, Jason Weston, William Stafford Noble and Michael J. MacCoss. Semi-supervised learning for peptide identification from shotgun proteomics datasets. Nature Methods 4:923-925, November 2007
[0722] 64. Lukas Käll, John D. Storey, Michael J. MacCoss and William Stafford Noble. Assigning confidence measures to peptides identified by tandem mass spectrometry. Journal of Proteome Research, 7(1):29-34, January 2008
[0723] 65. Lukas Käll, John D. Storey and William Stafford Noble. Nonparametric estimation of posterior error probabilities associated with peptides identified by tandem mass spectrometry. Bioinformatics, 24(16):142-148, August 2008
[0724] 66. Kinney R M, B J Johnson, V L Brown, D W Trent. Nucleotide Sequence of the 26 S mRNA of the Virulent Trinidad Donkey Strain of Venezuelan Equine Encephalitis Virus and Deduced Sequence of the Encoded Structural Proteins. Virology 152 (2), 400-413. 1986 Jul. 30.
[0725] 67. Jill E Slansky, Frederique M Rattis, Lisa F Boyd, Tarek Fahmy, Elizabeth M Jaffee, Jonathan P Schneck, David H Margulies, Drew M Pardoll. Enhanced Antigen-Specific Antitumor Immunity with Altered Peptide Ligands that Stabilize the MHC-Peptide-TCR Complex. Immunity, Volume 13, Issue 4, 1 Oct. 2000, Pages 529-538.
[0726] 68. A Y Huang, P H Gulden, A S Woods, M C Thomas, C D Tong, W Wang, V H Engelhard, G Pasternack, R Cotter, D Hunt, D M Pardoll, and E M Jaffee. The immunodominant major histocompatibility complex class I-restricted antigen of a murine colon tumor derives from an endogenous retroviral gene product. Proc Natl Acad Sci USA.; 93(18): 9730-9735, 1996 Sep. 3.
[0727] 69. JOHNSON, BARBARA J. B., RICHARD M. KINNEY, CRYSTLE L. KOST AND DENNIS W. TRENT. Molecular Determinants of Alphavirus Neurovirulence: Nucleotide and Deduced Protein Sequence Changes during Attenuation of Venezuelan Equine Encephalitis Virus. J Gen Virol 67:1951-1960, 1986.
[0728] 70. Aarnoudse, C. A., Krüse, M., Konopitzky, R., Brouwenstijn, N., and Schrier, P. I. (2002). TCR reconstitution in Jurkat reporter cells facilitates the identification of novel tumor antigens by cDNA expression cloning. Int J Cancer 99, 7-13.
[0729] 71. Alexander, J., Sidney, J., Southwood, S., Ruppert, J., Oseroff, C., Macwal, A., Snoke, K., Serra, H. M., Kubo, R. T., and Sette, A. (1994). Development of high potency universal DR-restricted helper epitopes by modification of high affinity DR-blocking peptides. Immunity 1, 751-761.
[0730] 72. Banu, N., Chia, A., Ho, Z. Z., Garcia, A. T., Paravasivam, K., Grotenbreg, G. M., Bertoletti, A., and Gehring, A. J. (2014). Building and optimizing a virus-specific T cell receptor library for targeted immunotherapy in viral infections. Scientific Reports 4, 4166.
[0731] 73. Cornet, S., Miconnet, I., Menez, J., Lemonnier, F., and Kosmatopoulos, K. (2006). Optimal organization of a polypeptide-based candidate cancer vaccine composed of cryptic tumor peptides with enhanced immunogenicity. Vaccine 24, 2102-2109.
[0732] 74. Depla, E., van der Aa, A., Livingston, B. D., Crimi, C., Allosery, K., de Brabandere, V., Krakover, J., Murthy, S., Huang, M., Power, S., et al. (2008). Rational design of a multiepitope vaccine encoding T-lymphocyte epitopes for treatment of chronic hepatitis B virus infections. Journal of Virology 82, 435-450.
[0733] 75. Ishioka, G. Y., Fikes, J., Hermanson, G., Livingston, B., Crimi, C., Qin, M., del Guercio, M. F., Oscroff, C., Dahlberg, C., Alexander, J., et al. (1999). Utilization of MHC class I transgenic mice for development of minigene DNA vaccines encoding multiple HLA-restricted CTL epitopes. J Immunol 162, 3915-3925.
[0734] 76. Janetzki, S., Price, L., Schroeder, H., Britten, C. M., Welters, M. J. P., and Hoos, A. (2015). Guidelines for the automated evaluation of Elispot assays. Nat Protoc 10, 1098-1115.
[0735] 77. Lyons, G. E., Moore, T., Brasic, N., Li, M., Roszkowski, J. J., and Nishimura, M. I. (2006). Influence of human CD8 on antigen recognition by T-cell receptor-transduced cells. Cancer Res 66, 11455-11461.
[0736] 78. Nagai, K., Ochi, T., Fujiwara, H., An, J., Shirakata, T., Mineno, J., Kuzushima, K., Shiku, H., Melenhorst, J. J., Gostick, E., et al. (2012). Aurora kinase A-specific T-cell receptor gene transfer redirects T lymphocytes to display effective antileukemia reactivity. Blood 119, 368-376.
[0737] 79. Panina-Bordignon, P., Tan, A., Termijtelen, A., Demotz, S., Corradin, G., and Lanzavecchia, A. (1989). Universally immunogenic T cell epitopes: promiscuous binding to human MHC class II and promiscuous recognition by T cells. Eur J Immunol 19, 2237-2242.
[0738] 80. Vitiello, A., Marchesini, D., Furze, J., Sherman, L. A., and Chesnut, R. W. (1991). Analysis of the HLA-restricted influenza-specific cytotoxic T lymphocyte response in transgenic mice carrying a chimeric human-mouse class I major histocompatibility complex. J Exp Med 173, 1007-1015.
[0739] 81. Yachi, P. P., Ampudia, J., Zal, T., and Gascoigne, N. R. J. (2006). Altered peptide ligands induce delayed CD8-T cell receptor interaction—a role for CD8 in distinguishing antigen quality. Immunity 25, 203-211.
[0740] 82. Pushko P, Parker M, Ludwig G V, Davis N L, Johnston R E, Smith J F. Replicon-helper systems from attenuated Venezuelan equine encephalitis virus: expression of heterologous genes in vitro and immunization against heterologous pathogens in vivo. Virology. 1997 Dec. 22; 239(2):389-401.
[0741] 83. Strauss, J H and E G Strauss. The alphaviruses: gene expression, replication, and evolution. Microbiol Rev. 1994 September; 58(3): 491-562.
[0742] 84. Rhême C, Ehrengruber M U, Grandgirard D. Alphaviral cytotoxicity and its implication in vector development. Exp Physiol. 2005 January; 90(1):45-52. Epub 2004 Nov. 12.
[0743] 85. Riley, Michael K. I I, and Wilfred Vermerris. Recent Advances in Nanomaterials for Gene Delivery-A Review. Nanomaterials 2017, 7(5), 94.
[0744] 86. Frolov I, Hardy R, Rice C M. Cis-acting RNA elements at the 5′ end of Sindbis virus genome RNA regulate minus- and plus-strand RNA synthesis. RNA. 2001 November; 7(11): 1638-51.
[0745] 87. Jose J, Snyder J E, Kuhn R J. A structural and functional perspective of alphavirus replication and assembly. Future Microbiol. 2009 September; 4(7):837-56.
[0746] 88. Bo Li and C. olin N. Dewey. RSEM: accurate transcript quantification from RNA-Seq data with or without a reference genome. BMC Bioinformatics, 12:323, August 2011
[0747] 89. Hillary Pearson, Tariq Daouda, Diana Paola Granados, Chantal Durette, Eric Bonneil, Mathieu Courcelles, Anja Rodenbrock, Jean-Philippe Laverdure, Caroline Côté, Sylvie Mader, Sebastien Lemieux, Pierre Thibault, and Claude Perreault. MHC class I-associated peptides derive from selective regions of the human genome. The Journal of Clinical Investigation, 2016,
[0748] 90. Juliane Liepe, Fabio Marino, John Sidney, Anita Jeko, Daniel E. Bunting, Alessandro Sette, Peter M. Kloetzel, Michael P. H. Stumpf, Albert J. R. Heck, Michele Mishto. A large fraction of HLA class I ligands are proteasome-generated spliced peptides. Science, 21, October 2016.
[0749] 91. Mommen G P., Marino, F., Meiring H D., Poelen, M C., van Gaans-van den Brink, J A., Mohammed S., Heck A J., and van Els C A. Sampling From the Proteome to the Human Leukocyte Antigen-DR (HLA-DR) Ligandome Proceeds Via High Specificity. Mol Cell Proteomics 15(4): 1412-1423, April 2016.
[0750] 92. Sebastian Kreiter, Mathias Vormehr, Niels van de Roemer, Mustafa Diken, Martin Lower, Jan Dickmann, Sebastian Boegel, Barbara Schrörs, Fulvia Vascotto, John C. Castle, Arbel D. Tadmor, Stephen P. Schoenberger, Christoph Huber, Özlem Türeci, and Ugur Sahin. Mutant MHC class II epitopes drive therapeutic immune responses to caner. Nature 520, 692-696, April 2015.
[0751] 93. Tran E., Turcotte S., Gros A., Robbins P. F., Lu Y. C., Dudley M. E., Wunderlich J. R., Somerville R. P., Hogan K., Hinrichs C. S., Parkhurst M. R., Yang J. C., Rosenberg S. A. Cancer immunotherapy based on mutation-specific CD4+ T cells in a patient with epithelial cancer. Science 344(6184) 641-645, May 2014.
[0752] 94. Andreatta M., Karosiene E., Rasmussen M., Stryhn A., Buus S., Nielsen M. Accurate pan-specific prediction of peptide-MHC class II binding affinity with improved binding core identification. Immunogenetics 67(11-12) 641-650, November 2015.
[0753] 95. Nielsen, M., Lund, O. NN-align. An artificial neural network-based alignment algorithm for MHC class II peptide binding prediction. BMC Bioinformatics 10:296, September 2009.
[0754] 96. Nielsen, M., Lundegaard, C., Lund, O. Prediction of MHC class II binding affinity using SMM-align, a novel stabilization matrix alignment method. BMC Bioinformatics 8:238, July 2007.
[0755] 97. Zhang, J., et al. PEAKS D B: de novo sequencing assisted database search for sensitive and accurate peptide identification. Molecular & Cellular Proteomics. 11(4):1-8. Jan. 2, 2012.
[0756] 98. Jensen, Kamilla Kjaergaard, et al. “Improved Methods for Predicting Peptide Binding Affinity to MHC Class II Molecules.” Immunology, 2018, doi: 10.1111/imm.12889.
[0757] 99. Carter, S. L., Cibulskis, K., Helman, E., McKenna, A., Shen, H., Zack, T., Laird, P. W., Onofrio, R. C., Winckler, W., Weir, B. A., et al. (2012). Absolute quantification of somatic DNA alterations in human cancer. Nat. Biotechnol. 30, 413-421
[0758] 100. McGranahan, N., Rosenthal, R., Hiley, C. T., Rowan, A. J., Watkins, T. B. K., Wilson, G. A., Birkbak, N. J., Vecriah, S., Van Loo, P., Herrero, J., et al. (2017). Allele-Specific HLA Loss and Immune Escape in Lung Cancer Evolution. Cell 171, 1259-1271.e11.
[0759] 101. Shukla, S. A., Rooney, M. S., Rajasagi, M., Tiao, G., Dixon, P. M., Lawrence, M. S., Stevens, J., Lane, W. J., Dellagatta, J. L., Steelman, S., et al. (2015). Comprehensive analysis of cancer-associated somatic mutations in class I HLA genes. Nat. Biotechnol. 33, 1152-1158.
[0760] 102. Van Loo, P., Nordgard, S. H., Lingjærde, O. C., Russnes, H. G., Rye, I. H., Sun, W., Weigman, V. J., Marynen, P., Zetterberg, A., Naume, B., et al. (2010). Allele-specific copy number analysis of tumors. Proc. Natl. Acad. Sci. U.S.A 107, 16910-16915.
[0761] 103. Van Loo, P., Nordgard, S. H., Lingjærde, O. C., Russnes, H. G., Rye, I. H., Sun, W., Weigman, V. J., Marynen, P., Zetterberg, A., Naume, B., et al. (2010). Allele-specific copy number analysis of tumors. Proc. Natl. Acad. Sci. U.S.A 107, 16910-16915.

What is claimed is:

1. A composition for delivery of an antigen expression system, comprising:
the antigen expression system, wherein the antigen expression system comprises at least two distinct coronavirus receptor binding domain (RBD) derived nucleic acid sequences encoding at least two distinct RBD domains, respectively, and wherein the at least two distinct RBD domains are collectively at least 70% identical by amino acid composition to RBD domains from at least two of a clade 1 Sarbecovirus, a clade 2 Sarbecovirus, or a clade 3 Sarbecovirus.

2. A composition for delivery of an antigen expression system, comprising:
the antigen expression system, wherein the antigen expression system comprises:
(a) a vector comprising:
a vector backbone, wherein the vector backbone comprises:
(i) at least one promoter nucleotide sequence, and
(ii) at least one polyadenylation (poly(A)) sequence; and
(b) an antigen cassette, wherein the antigen cassette is inserted into the vector backbone such that the antigen cassette is operably linked to the at least one promoter nucleotide sequence, and wherein the antigen cassette comprises at least two distinct coronavirus receptor binding domain (RBD) derived nucleic acid sequences encoding at least two distinct RBD domains, respectively, and wherein the at least two distinct RBD domains are collectively at least 70% identical by amino acid composition to RBD domains from at least two of a clade 1 Sarbecovirus, a clade 2 Sarbecovirus, or a clade 3 Sarbecovirus.

3. Any one of the above compositions, wherein the at least two distinct RBD domains are collectively at least 70% identical by amino acid composition to RBD domains from each of: (A) the clade 3 Sarbecovirus; and (B) the clade 1 Sarbecovirus and/or the clade 2 Sarbecovirus.

4. Any one of the above compositions, wherein the at least two distinct RBD domains are collectively at least 80% identical by amino acid composition to RBD domains from each of the clade 1 Sarbecovirus and the clade 2 Sarbecovirus.

5. Any one of the above compositions, wherein the at least two distinct RBD domains are collectively at least 85% identical by amino acid composition to RBD domains from each of the clade 1 Sarbecovirus and the clade 2 Sarbecovirus.

6. Any one of the above compositions, wherein the at least two distinct RBD domains are collectively at least 90% identical by amino acid composition to RBD domains from each of the clade 1 Sarbecovirus and the clade 2 Sarbecovirus.

7. Any one of the above compositions, wherein the at least two distinct RBD domains are collectively at least 70% identical by amino acid composition to RBD domains from each of NC_045512.2, NC_004718.3, MT121216.1, DQ648857.1, GQ153542.1, DQ648856.1, AY278489.2, GQ153540.1, MN996532.2, KJ473811.1, NC_014470.1, KC881005.1, MK211377.1, KJ473816.1, MK211376.1, AY572034.1, KP886809.1, MT072864.1, KF569996.1, JX993987.1, MK211378.1, MK211374.1, KJ473815.1, JX993988.1, DQ071615.1, KT444582.1, MZ206298.1, and KJ473814.1.

8. Any one of the above compositions, wherein the antigen expression system comprises at least three distinct coronavirus RBD derived nucleic acid sequences encoding at least three distinct RBD domain.

9. The composition of claim 8, wherein the at least three distinct RBD domains are collectively at least 70% identical by amino acid composition to RBD domains from each of the clade 1 Sarbecovirus, the clade 2 Sarbecovirus, and the clade 3 Sarbecovirus.

10. The composition of claim 8, wherein the at least three distinct RBD domains are collectively at least 70% identical by amino acid composition to RBD domains from each of NC_045512.2, NC_004718.3, MT121216.1, DQ648857.1, GQ153542.1, DQ648856.1, AY278489.2, GQ153540.1, MN996532.2, KJ473811.1, NC_014470.1, KC881005.1, MK211377.1, KJ473816.1, MK211376.1, AY572034.1, KP886809.1, MT072864.1, KF569996.1, JX993987.1, MK211378.1, MK211374.1, KJ473815.1, JX993988.1, DQ071615.1, KT444582.1, MZ206298.1, KJ473814.1, and SARS-COV-2.

11. Any one of the above compositions, wherein the antigen expression system comprises at least four distinct coronavirus RBD derived nucleic acid sequences encoding at least four distinct RBD domain.

12. The composition of claim 11, wherein the at least four distinct RBD domains are collectively at least 70% identical by amino acid composition to RBD domains from each of the clade 1 Sarbecovirus, the clade 2 Sarbecovirus, and the clade 3 Sarbecovirus.

13. The composition of claim 11, wherein the at least four distinct RBD domains are collectively at least 70% identical by amino acid composition to RBD domains from each of NC_045512.2, NC_004718.3, MT121216.1, DQ648857.1, GQ153542.1, DQ648856.1, AY278489.2, GQ153540.1, MN996532.2, KJ473811.1, NC_014470.1, KC881005.1, MK211377.1, KJ473816.1, MK211376.1, AY572034.1, KP886809.1, MT072864.1, KF569996.1, JX993987.1, MK211378.1, MK211374.1, KJ473815.1, JX993988.1, DQ071615.1, KT444582.1, MZ206298.1, KJ473814.1, and SARS-COV2.

14. Any one of the above compositions, wherein each of the sarbecovirus RBD derived nucleic acid sequences are independently derived from RBD nucleic acid sequences of sarbecovirus sequences selected from the group consisting of: KP886809, KJ473815, MK211376, DQ648856, GQ153542, NC_004718, JX993988, and SARS-COV2.

15. The composition of claim 14, wherein each of the sarbecovirus RBD derived nucleic acid sequences are independently derived from RBD nucleic acid sequences of sarbecovirus sequences from each of KP886809, KJ473815, MK211376, and SARS-COV2.

16. The composition of claim 14, wherein each of the sarbecovirus RBD derived nucleic acid sequences are independently derived from RBD nucleic acid sequences of sarbecovirus sequences from each of KJ473815, MK211376, DQ648856, and SARS-COV2.

17. The composition of claim 14, wherein each of the sarbecovirus RBD derived nucleic acid sequences are independently derived from RBD nucleic acid sequences of sarbecovirus sequences from each of GQ153542, NC_004718, JX993988, and SARS-CoV2.

18. Any one of the above compositions, wherein the at least two distinct RBD domains encode full-length RBD domains that are collectively at least 70% identical by amino acid composition to full-length RBD domains from at least two of the clade 1 Sarbecovirus, the clade 2 Sarbecovirus, or the clade 3 Sarbecovirus.

19. Any one of the above compositions, wherein the at least two distinct RBD domains encode full-length RBD domains that are collectively at least 70% identical by amino acid composition to full-length RBD domains from at least two of the clade 1 Sarbecovirus, the clade 2 Sarbecovirus, or the clade 3 Sarbecovirus.

20. Any one of the above compositions, wherein the at least two distinct coronavirus RBD derived nucleic acid sequences comprise at least a betacoronavirus RBD derived nucleic acid sequence.

21. Any one of the above compositions, wherein the at least two distinct coronavirus RBD derived nucleic acid sequences each comprise a betacoronavirus RBD derived nucleic acid sequences.

22. Any one of the above compositions, wherein the at least two distinct coronavirus RBD derived nucleic acid sequences are selected from the group consisting of: a betacoronavirus RBD derived nucleic acid sequence, an alphacoronavirus RBD derived nucleic acid sequence, and combinations thereof.

23. Any one of the above compositions, wherein each of the distinct RBD domains comprises a distinct receptor-binding motif (RBM) domain, respectively, and wherein the distinct RBM domains are collectively at least 30% identical by amino acid composition to RBM domains from at least two of a clade 1 Sarbecovirus, a clade 2 Sarbecovirus, or a clade 3 Sarbecovirus.

24. Any one of the above compositions, wherein the amino acid sequences of the at least two distinct RBD domains other than the amino acid sequences of their respective RBM domains are collectively at least 70% identical by amino acid composition to the amino acid sequences of RBD domains sequences other than the amino acid sequences of an RBM from at least two of a clade 1 Sarbecovirus, a clade 2 Sarbecovirus, or a clade 3 Sarbecovirus.

25. A composition for delivery of an antigen expression system, comprising:
the antigen expression system, wherein the antigen expression system comprises at least two distinct coronavirus receptor binding domain (RBD) derived nucleic acid sequences encoding at least two distinct RBD domains, respectively, and wherein the at least two distinct RBD domains are at least 70% identical by amino acid composition to RBD domains from at least two of a sarbecovirus RBD derived nucleic acid sequence, a merbecoviorus RBD derived nucleic acid sequence, a embecovirus RBD derived nucleic acid sequence, and combinations thereof.

26. Any one of the above compositions, wherein the at least two distinct RBD domains comprises between 2-4, between 2-5, between 2-6, between 2-7, between 2-8, between 2-9, between 2-10, between 2-11, between 2-12, between 2-13, between 2-14, between 2-15, between 2-16, between 2-17, between 2-18, between 2-19, or between 2-20 distinct RBD domains.

27. Any one of the above compositions, wherein the at least two distinct RBD domains comprises between 3-8, between 4-8, between 3-8, between 4-8, between 3-9, between 4-9, between 3-10, or between 4-10 distinct RBD domains.

28. Any one of the above compositions, wherein the at least two distinct coronavirus RBD derived nucleic acid sequences are encoded by a single polynucleotide sequence.

29. The composition of claim 28, wherein the at least two distinct coronavirus RBD derived nucleic acid sequences are encoded by a single antigen cassette.

30. Any one of the above compositions, wherein the at least two distinct coronavirus RBD derived nucleic acid sequences are each encoded by separate polynucleotide sequences.

31. The composition of claim 30, wherein the at least two distinct coronavirus RBD derived nucleic acid sequences are each encoded by separate antigen cassettes.

32. The composition of claim 31, wherein the separate antigen cassettes are each encoded by separate vectors.

33. Any one of the above compositions, wherein each of the at least two distinct coronavirus RBD derived nucleic acid sequences further comprises a distinct trimerization domain derived nucleic acid sequence.

34. Any one of the above compositions, wherein each of the at least two distinct coronavirus RBD derived nucleic acid sequences comprises the same RBD trimerization domain derived nucleic acid sequence.

35. The composition of claim 33 or 34, wherein the RBD trimerization domain is selected from the group consisting of: a T4 trimerization domain, a MTQ trimerization domain; a GCN4 trimerization domain, and combinations thereof.

36. The composition of claim 34, wherein each of the at least two distinct coronavirus RBD derived nucleic acid sequences comprises a T4 trimerization domain derived nucleic acid sequence.

37. The composition of claim 33, wherein the at least two distinct coronavirus RBD derived nucleic acid sequences comprises each independently comprise a T4 trimerization domain, a MTQ trimerization domain; a GCN4 trimerization domain.

38. Any one of the above compositions, wherein the coronavirus RBD derived nucleic acid sequence encodes a full-length RBD domain.

39. Any one of the above compositions, wherein the coronavirus RBD derived nucleic acid sequence encodes a RBD domain (a) lacking a receptor-binding motif (RBM) domain, (b) comprising an RBM domain that is not derived from the coronavirus the remainder of the RBD is derived from, or (c) comprising RBD sequences that are not derived from the coronavirus the RBM domain is derived from.

40. Any one of the above compositions, wherein the coronavirus RBD derived nucleic acid sequence encodes only an RBM domain of the corresponding RBD domain.

41. Any one of the above compositions, wherein the at least two distinct coronavirus RBD derived nucleic acid sequences are linked directly to one another.

42. The composition of claim 41, wherein the at least two distinct coronavirus RBD derived nucleic acid sequences are concatenated such that the sequences are capable of being expressed as a single mRNA.

43. The composition of claim 41 or 42, wherein the at least two distinct coronavirus RBD derived nucleic acid sequences are linked together with a peptide-linker encoding nucleic acid sequence.

44. The composition of claim 43, wherein the peptide-linker encoding nucleic acid sequence encodes a 2A ribosome skipping sequence element, optionally selected from the group consisting of: a E2A ribosome skipping sequence element, a P2A ribosome skipping sequence element, a F2A ribosome skipping sequence element, a T2A sequence ribosome skipping sequence element, and combinations thereof.

45. The composition of claim 43 or 44, wherein the peptide-linker encoding nucleic acid sequence encodes a cleavable peptide linker, optionally selected from: a TEV cleavage site, a furin cleavage site, and combinations thereof.

46. The composition of claim 43, wherein the peptide-linker encoding nucleic acid sequence encodes a T2A sequence ribosome skipping sequence element and a furin cleavage site.

47. Any one of the above compositions, wherein each of the at least two distinct coronavirus RBD derived nucleic acid sequences further comprises a signal-peptide encoding nucleic acid sequence.

48. The composition of claim 47, wherein the signal-peptide comprises a coronavirus derived signal-peptide.

49. The composition of claim 48, wherein the signal-peptide comprises a SARS-COV-2 derived signal-peptide.

50. Any one of the above compositions, wherein one or more of the at least two distinct coronavirus RBD derived nucleic acid sequences are sequence optimized.

51. Any one of the above compositions, wherein the at least two distinct coronavirus RBD derived nucleic acid sequences are operably linked to a promoter.

52. The composition of claim 47, wherein the at least two distinct coronavirus RBD derived nucleic acid sequences are operably linked to a single promoter.

53. The composition of claim 47, wherein each of the at least two distinct coronavirus RBD derived nucleic acid sequences are operably linked to a separate promoter.

54. The composition of any one of claims 47-53, wherein the promoter comprises a subgenomic promoter sequence, optionally wherein the subgenomic promoter sequence comprises an alphavirus derived subgenomic promoter sequence.

55. Any one of the above compositions, wherein each of the at least two distinct coronavirus RBD derived nucleic acid sequences each separately encodes a peptide of the following format: signal peptide-RBD-trimerization domain.

56. Any one of the above compositions, wherein the at least two distinct coronavirus RBD derived nucleic acid sequences encodes a concatenated peptide of the following format: signal peptide-first RBD-first trimerization domain-signal peptide-second RBD-second trimerization domain-signal peptide-third RBD-third trimerization domain.

57. Any one of the above compositions, wherein the at least two distinct coronavirus RBD derived nucleic acid sequences encodes a concatenated peptide of the following format: signal peptide-first RBD-first trimerization domain-T2A-Furin-signal peptide-second RBD-second trimerization domain-T2A-Furin-signal peptide-third RBD-third trimerization domain.

58. Any one of the above compositions, wherein at least one of the at least two distinct RBD domains comprises a SARS-COV-2 SPIKE protein.

59. The composition of claim 58, wherein the SARS-COV-2 SPIKE protein is encoded by a SARS-COV-2 SPIKE derived nucleic acid sequence comprising:
a) a SARS-COV-2 Spike protein comprising a Spike polypeptide sequence as set forth in SEQ ID NO:59 or an epitope-containing fragment thereof, optionally wherein the Spike polypeptide comprises a D614G mutation with reference to SEQ ID NO:59, and optionally wherein the Spike polypeptide is encoded by the nucleotide sequence shown in SEQ ID NO:79, SEQ ID NO:83, SEQ ID NO:85, or SEQ ID NO:87; or
b) a SARS-COV-2 modified Spike protein comprising a mutation selected from the group consisting of: a Spike R682 mutation, a Spike R815 mutation, a Spike K986P mutation, a Spike V987P mutation, and combinations thereof with reference to the Spike polypeptide sequence as set forth in SEQ ID NO:59, and optionally wherein the modified Spike protein comprises a polypeptide sequence as set forth in SEQ ID NO:60 or SEQ ID NO:90 or an epitope-containing fragment thereof.

60. Any one of the above compositions, wherein the antigen expression system comprises at least one coronavirus derived nucleic acid sequence encoding an immunogenic polypeptide distinct from the at least two distinct RBD domains.

61. The composition of claim 58, wherein the at least one coronavirus derived nucleic acid sequence comprises a beta coronavirus derived nucleic acid sequence.

62. Any one of the above compositions, wherein the antigen expression system comprises at least one SARS-COV-2 derived nucleic acid sequence encoding an immunogenic polypeptide.

63. Any one of the above compositions, wherein the antigen cassette comprises at least one SARS-COV-2 derived nucleic acid sequence encoding an immunogenic polypeptide.

64. The composition of claim 62 or 63, wherein the at least one SARS-COV-2 derived nucleic acid sequence comprises a SARS-COV-2 SPIKE derived nucleic acid sequence.

65. The composition of claim 64, wherein the SARS-COV-2 SPIKE derived nucleic acid sequence comprises:
a) a SARS-COV-2 Spike protein comprising a Spike polypeptide sequence as set forth in SEQ ID NO:59 or an epitope-containing fragment thereof, optionally wherein the Spike polypeptide comprises a D614G mutation with reference to SEQ ID NO:59, and optionally wherein the Spike polypeptide is encoded by the nucleotide sequence shown in SEQ ID NO:79, SEQ ID NO:83, SEQ ID NO:85, or SEQ ID NO:87; or
b) a SARS-COV-2 modified Spike protein comprising a mutation selected from the group consisting of: a Spike R682 mutation, a Spike R815 mutation, a Spike K986P mutation, a Spike V987P mutation, and combinations thereof with reference to the Spike polypeptide sequence as set forth in SEQ ID NO:59, and optionally wherein the modified Spike protein comprises a polypeptide sequence as set forth in SEQ ID NO:60 or SEQ ID NO:90 or an epitope-containing fragment thereof.

66. The composition of any one of claims 58-65, wherein the at least one coronavirus derived nucleic acid sequence and/or SARS-COV-2 derived nucleic acid sequence comprises an MHC class I epitope encoding sequence.

67. The composition of any one of claims 58-66, wherein the at least one coronavirus derived nucleic acid sequence, SARS-COV-2 derived nucleic acid sequence, and/or MHC class I epitope encoding sequence comprises:
at least one MHC class I epitope comprising a polypeptide sequence as set forth in Table A,
at least one MHC class II epitope comprising a polypeptide sequence as set forth in Table B,
at least one MHC class I epitope comprising a polypeptide sequence as set forth in Table C, optionally wherein the at least one MHC I epitope is present in a concatenated polypeptide sequence as set forth in SEQ ID NO:57 or SEQ ID NO:58,
at least one polypeptide sequence as set forth in Table 7, or an epitope-containing fragment thereof, optionally wherein the at least one polypeptide sequence is present in a concatenated polypeptide sequence as set forth in SEQ ID NO:92,
at least one polypeptide sequence as set forth in Table 9A, Table 9B, or Table 9C, or an epitope-containing fragment thereof, optionally wherein the at least one polypeptide sequence is present in a concatenated polypeptide comprising each of the sequences set forth in Table 9A, Table 9B, or Table 9C, optionally wherein the concatenated polypeptide comprises the order of sequences set forth in Table 9A, Table 9B, or Table 9C,
at least one MHC class I epitope comprising a polypeptide sequence as set forth in Table A and/or Table C or MHC class II epitope comprising a polypeptide sequence as set forth in Table B, wherein the encoded SARS-COV-2 immunogenic polypeptide is conserved between SARS-COV-2 and a Coronavirus species and/or sub-species other than SARS-COV-2, optionally wherein the Coronavirus species and/or sub-species other than SARS-COV-2 is Severe acute respiratory syndrome (SARS) and/or Middle East respiratory syndrome (MERS),
one or more validated epitopes and/or at least 4, 5, 6, or 7 predicted epitopes, wherein at least 85%, 90%, or 95% of a population carries at least one HLA validated to present at least one of the one or more validated epitopes and/or at least one HLA predicted to present each of the at least 4, 5, 6, or 7 predicted epitopes,
a SARS-COV-2 Spike protein comprising a Spike polypeptide sequence as set forth in SEQ ID NO:59 or an epitope-containing fragment thereof, optionally wherein the Spike polypeptide comprises a D614G mutation with reference to SEQ ID NO:59, and optionally wherein the Spike polypeptide is encoded by the nucleotide sequence shown in SEQ ID NO:79, SEQ ID NO:83, SEQ ID NO:85, or SEQ ID NO:87,
a SARS-COV-2 modified Spike protein comprising a mutation selected from the group consisting of: a Spike R682 mutation, a Spike R815 mutation, a Spike K986P mutation, a Spike V987P mutation, and combinations thereof with reference to the Spike polypeptide sequence as set forth in SEQ ID NO:59, and optionally wherein the modified Spike protein comprises a polypeptide sequence as set forth in SEQ ID NO:60 or SEQ ID NO:90 or an epitope-containing fragment thereof,
a SARS-COV-2 Membrane protein comprising a Membrane polypeptide sequence as set forth in SEQ ID NO:61 or an epitope-containing fragment thereof,
a SARS-COV-2 Nucleocapsid protein comprising a Nucleocapsid polypeptide sequence as set forth in SEQ ID NO:62 or an epitope-containing fragment thereof,
a SARS-COV-2 Envelope protein comprising an Envelope polypeptide sequence as set forth in SEQ ID NO:63 or an epitope-containing fragment thereof,
a variant of any of the above comprising a mutation found in 1% or greater of SARS-CoV-2 subtypes, optionally wherein the variant comprises a SARS-COV-2 variant shown in Table 1, and/or optionally wherein the variant comprises a SARS-COV-2 variant Spike protein comprising a Spike D614G mutation with reference to the Spike polypeptide sequence as set forth in SEQ ID NO:59, a SARS-COV-2 variant Spike protein corresponding to a B.1.351 SARS-COV-2 isolate optionally comprising the Spike polypeptide sequence as set forth in SEQ ID NO:112, or a SARS-COV-2 variant Spike protein corresponding to a B.1.1.7 SARS-COV-2 isolate optionally comprising the Spike polypeptide sequence as set forth in SEQ ID NO:110,
at least one polypeptide sequence as set forth in Table 16A, Table 16B, Table 16C, or Table 16D, or an epitope-containing fragment thereof, optionally wherein the at least one polypeptide sequence is present in a concatenated polypeptide comprising each of the sequences set forth in Table 16A, Table 16B, Table 16C, or Table 16D, optionally wherein the concatenated polypeptide comprises the order of sequences set forth in Table 16A, Table 16B, Table 16C, or Table 16D,
or combinations thereof.

68. The composition of claim 67, wherein the MHC class I epitope encoding sequence comprises at least one polypeptide sequence as set forth in Table 16A, Table 16B, Table 16C, or Table 16D, or an epitope-containing fragment thereof, optionally wherein the at least one polypeptide sequence is present in a concatenated polypeptide comprising each of the sequences set forth in Table 16A, Table 16B, Table 16C, or Table 16D, optionally wherein the concatenated polypeptide comprises the order of sequences set forth in Table 16A, Table 16B, Table 16C, or Table 16D.

69. The composition of any one of claims 58-68, wherein the at least one coronavirus derived nucleic acid sequence, SARS-COV-2 derived nucleic acid sequence, and/or MHC class I epitope encoding sequence is selected from the group consisting of: a Spike protein, a Membrane protein, a Nucleocapsid protein, an Envelope protein, a replicase orf1a and orf1b protein, and combinations thereof.

70. The composition of any one of claims 58-69, wherein the at least one coronavirus derived nucleic acid sequence is encoded on a separate vector distinct from the vector or vectors encoding the at least two distinct coronavirus RBD derived nucleic acid sequences, optionally wherein the encoded immunogenic polypeptide distinct from the at least two distinct coronavirus RBD comprises a MHC class I epitope encoding sequence comprising at least one polypeptide sequence as set forth in Table 16A, Table 16B, Table 16C, or Table 16D, or an epitope-containing fragment thereof, optionally wherein the at least one polypeptide sequence is present in a concatenated polypeptide comprising each of the sequences set forth in Table 16A, Table 16B, Table 16C, or Table 16D, optionally wherein the concatenated polypeptide comprises the order of sequences set forth in Table 16A, Table 16B, Table 16C, or Table 16D.

71. Any one of the above compositions, wherein following administration to a subject, the composition is capable of stimulating an immune response against multiple coronaviruses.

72. Any one of the above compositions, wherein following administration to a subject, the composition is capable of stimulating an immune response against at least each of the coronaviruses from which the at least two distinct coronavirus RBD derived nucleic acid sequences were derived.

73. Any one of the above compositions, wherein following administration to a subject, the composition is capable of stimulating an immune response against a coronavirus distinct from the coronaviruses from which the at least two distinct coronavirus RBD derived nucleic acid sequences were derived.

74. Any one of the above compositions, wherein the composition is capable of stimulating neutralizing antibody production.

75. The composition of claim 74, wherein the composition wherein stimulating neutralizing antibody production comprises a neutralizing antibody titer having an NT50 value calculated as a minimum dilution of sera from the immunized subject that neutralizes a coronavirus by 50%.

76. The composition of claim 74 or 75, wherein stimulating neutralizing antibody production comprises a minimum neutralizing antibody titer for complete neutralization of the coronavirus.

77. Any one of the above compositions, wherein the composition is capable of stimulating antibody production, wherein the antibodies produced are capable of antibody-mediated viral clearance, optionally wherein the antibody-mediated viral clearance comprises Fc-mediated viral clearance.

78. Any one of the above compositions, wherein the antigen expression system comprises one or more vectors, the one or more vectors comprising:
(a) a vector backbone, wherein the vector backbone comprises a chimpanzee adenovirus vector, optionally wherein the chimpanzee adenovirus vector is a ChAdV68 vector, or an alphavirus vector, optionally wherein the alphavirus vector is a Venezuelan equine encephalitis virus vector; and
(b) a cassette encoding the at least two distinct RBD domains, optionally wherein the cassette is integrated between a native promoter nucleotide sequence native to the vector backbone and a poly(A) sequence, optionally wherein the poly(A) sequence is native to the vector backbone.

79. Any one of the above compositions, wherein the antigen expression system comprises one or more vectors, the one or more vectors comprising a vector backbone derived from a Venezuelan equine encephalitis virus.

80. A composition for delivery of an antigen expression system, comprising:
the antigen expression system, wherein the antigen expression system comprises:
(a) optionally, one or more vectors, the one or more vectors comprising:
a vector backbone, wherein the backbone comprises:
(i) at least one promoter nucleotide sequence, and
(ii) at least one polyadenylation (poly(A)) sequence; and
(b) an antigen cassette, optionally wherein the antigen cassette is inserted into the vector backbone when present, and wherein the antigen cassette comprises at least one SARS-CoV-2 derived nucleic acid sequence encoding an immunogenic polypeptide, wherein the immunogenic polypeptide comprises at least one polypeptide sequence as set forth in Table 16A, Table 16B, Table 16C, or Table 16D, or an epitope-containing fragment thereof, optionally wherein the at least one polypeptide sequence is present in a concatenated polypeptide comprising each of the sequences set forth in Table 16A, Table 16B, Table 16C, or Table 16D, optionally wherein the concatenated polypeptide comprises the order of sequences set forth in Table 16A, Table 16B, Table 16C, or Table 16D.

81. The composition of claim 80, wherein the MHC class I epitope encoding sequence comprises at least one polypeptide sequence as set forth in Table 16A, Table 16B, Table 16C, or Table 16D, or an epitope-containing fragment thereof, optionally wherein the at least one polypeptide sequence is present in a concatenated polypeptide comprising each of the sequences set forth in Table 16A, Table 16B, Table 16C, or Table 16D, optionally wherein the concatenated polypeptide comprises the order of sequences set forth in Table 16A, Table 16B, Table 16C, or Table 16D.

82. A pharmaceutical composition comprising the composition of any one of the above claims and a pharmaceutically acceptable carrier.

83. An isolated nucleotide sequence or set of isolated nucleotide sequences comprising the antigen expression system and/or the antigen cassette of any one of the above claims.

84. A vector or set of vectors comprising the antigen expression system, the antigen cassette nucleotide sequence, and/or the isolated nucleotide sequence of any one of the above claims.

85. A method for treating a coronavirus infection or preventing a coronavirus infection in a subject, the method comprising administering to the subject the composition of any of the above composition claims.

86. A method for inducing an immune response in a subject, the method comprising administering to the subject the composition of any of the above composition claims.

87. The method of claim 85 or 86, wherein the method comprises a homologous prime/boost strategy.

88. The method of claim 85 or 86, wherein the method comprises a heterologous prime/boost strategy, optionally wherein the heterologous prime/boost strategy comprises (a) an identical antigen cassette encoded by different vaccine platforms, (b) different antigen cassettes encoded by the same vaccine platform, and/or (c) different antigen cassettes encoded by different vaccine platforms.

89. The method of any one of claims 85-88, wherein the method comprises administering a vector or vectors encoding the at least two distinct coronavirus RBD derived nucleic acid sequences and administering a vector or vectors encoding at least one coronavirus derived nucleic acid sequence encoding an immunogenic polypeptide distinct from the at least two distinct RBD domains.

90. The method of claim 89, wherein the vector or vectors encoding the at least two distinct coronavirus RBD derived nucleic acid sequences and the vector or vectors encoding at least one coronavirus derived nucleic acid sequence are co-formulated.

91. The method of claim 89, wherein the vector or vectors encoding the at least two distinct coronavirus RBD derived nucleic acid sequences and the vector or vectors encoding at least one coronavirus derived nucleic acid sequence are administered separately.

92. The method of claim 91, wherein the vector or vectors encoding the at least two distinct coronavirus RBD derived nucleic acid sequences and the vector or vectors encoding at least one coronavirus derived nucleic acid sequence are administered concurrently.

93. The method of any one of claims 89-92, wherein the at least one coronavirus derived nucleic acid sequence comprises:
at least one MHC class I epitope comprising a polypeptide sequence as set forth in Table A,
at least one MHC class II epitope comprising a polypeptide sequence as set forth in Table B,
at least one MHC class I epitope comprising a polypeptide sequence as set forth in Table C, optionally wherein the at least one MHC I epitope is present in a concatenated polypeptide sequence as set forth in SEQ ID NO:57 or SEQ ID NO:58,
at least one polypeptide sequence as set forth in Table 7, or an epitope-containing fragment thereof, optionally wherein the at least one polypeptide sequence is present in a concatenated polypeptide sequence as set forth in SEQ ID NO:92,
at least one polypeptide sequence as set forth in Table 9A, Table 9B, or Table 9C, or an epitope-containing fragment thereof, optionally wherein the at least one polypeptide sequence is present in a concatenated polypeptide comprising each of the sequences set forth in Table 9A, Table 9B, or Table 9C, optionally wherein the concatenated polypeptide comprises the order of sequences set forth in Table 9A, Table 9B, or Table 9C,
at least one MHC class I epitope comprising a polypeptide sequence as set forth in Table A and/or Table C or MHC class II epitope comprising a polypeptide sequence as set forth in Table B, wherein the encoded SARS-COV-2 immunogenic polypeptide is conserved between SARS-COV-2 and a Coronavirus species and/or sub-species other than SARS-COV-2, optionally wherein the Coronavirus species and/or sub-species other than SARS-COV-2 is Severe acute respiratory syndrome (SARS) and/or Middle East respiratory syndrome (MERS),
one or more validated epitopes and/or at least 4, 5, 6, or 7 predicted epitopes, wherein at least 85%, 90%, or 95% of a population carries at least one HLA validated to present at least one of the one or more validated epitopes and/or at least one HLA predicted to present each of the at least 4, 5, 6, or 7 predicted epitopes,
a SARS-COV-2 Spike protein comprising a Spike polypeptide sequence as set forth in SEQ ID NO:59 or an epitope-containing fragment thereof, optionally wherein the Spike polypeptide comprises a D614G mutation with reference to SEQ ID NO:59, and optionally wherein the Spike polypeptide is encoded by the nucleotide sequence shown in SEQ ID NO:79, SEQ ID NO:83, SEQ ID NO:85, or SEQ ID NO:87,
a SARS-COV-2 modified Spike protein comprising a mutation selected from the group consisting of: a Spike R682 mutation, a Spike R815 mutation, a Spike K986P mutation, a Spike V987P mutation, and combinations thereof with reference to the Spike polypeptide sequence as set forth in SEQ ID NO:59, and optionally wherein the modified Spike protein comprises a polypeptide sequence as set forth in SEQ ID NO:60 or SEQ ID NO:90 or an epitope-containing fragment thereof,
a SARS-COV-2 Membrane protein comprising a Membrane polypeptide sequence as set forth in SEQ ID NO:61 or an epitope-containing fragment thereof,
a SARS-COV-2 Nucleocapsid protein comprising a Nucleocapsid polypeptide sequence as set forth in SEQ ID NO:62 or an epitope-containing fragment thereof,
a SARS-COV-2 Envelope protein comprising an Envelope polypeptide sequence as set forth in SEQ ID NO:63 or an epitope-containing fragment thereof,
a variant of any of the above comprising a mutation found in 1% or greater of SARS-CoV-2 subtypes, optionally wherein the variant comprises a SARS-COV-2 variant shown in Table 1, and/or optionally wherein the variant comprises a SARS-COV-2 variant Spike protein comprising a Spike D614G mutation with reference to the Spike polypeptide sequence as set forth in SEQ ID NO:59, a SARS-COV-2 variant Spike protein corresponding to a B.1.351 SARS-COV-2 isolate optionally comprising the Spike polypeptide sequence as set forth in SEQ ID NO:112, or a SARS-COV-2 variant Spike protein corresponding to a B.1.1.7 SARS-COV-2 isolate optionally comprising the Spike polypeptide sequence as set forth in SEQ ID NO:110,
at least one polypeptide sequence as set forth in Table 16A, Table 16B, Table 16C, or Table 16D, or an epitope-containing fragment thereof, optionally wherein the at least one polypeptide sequence is present in a concatenated polypeptide comprising each of the sequences set forth in Table 16A, Table 16B, Table 16C, or Table 16D, optionally wherein the concatenated polypeptide comprises the order of sequences set forth in Table 16A, Table 16B, Table 16C, or Table 16D,
or combinations thereof.

94. The method of any one of claims 89-92, wherein the at least one coronavirus derived nucleic acid sequence comprises a MHC class I epitope encoding sequence comprising at least one polypeptide sequence as set forth in Table 16A, Table 16B, Table 16C, or Table 16D, or an epitope-containing fragment thereof, optionally wherein the at least one polypeptide sequence is present in a concatenated polypeptide comprising each of the sequences set forth in Table 16A, Table 16B, Table 16C, or Table 16D, optionally wherein the concatenated polypeptide comprises the order of sequences set forth in Table 16A, Table 16B, Table 16C, or Table 16D.

95. A method of manufacturing the vector or set of vectors, the antigen expression system. the antigen cassette nucleotide sequence, and/or the isolated nucleotide sequence of any one of the above composition claims.

The application's sequence listing, which the Patent Office published only in electronic form, follows.

SEQUENCE LISTING (28043 sequences)

SEQ ID NO: 1-2 - skipped (2 entries)

SEQ ID NO: 3 - RNA, 11447 nt, Venezuelan equine encephalitis virus
  source 1..11447: mol_type = other RNA
atgggcggcgcatgagagaagcccagaccaattacctacccaaaatggagaaagttcacgttgacatcgaggaagacagcccattcctcagagctttgcagcggagcttcccgcagtttgaggtagaagccaagcaggtcactgataatgaccatgctaatgccagagcgttttcgcatctggcttcaaaactgatcgaaacggaggtggacccatccgacacgatccttgacattggaagtgcgcccgcccgcagaatgtattctaagcacaagtatcattgtatctgtccgatgagatgtgcggaagatccggacagattgtataagtatgcaactaagctgaagaaaaactgtaaggaaataactgataaggaattggacaagaaaatgaaggagctcgccgccgtcatgagcgaccctgacctggaaactgagactatgtgcctccacgacgacgagtcgtgtcgctacgaagggcaagtcgctgtttaccaggatgtatacgcggttgacggaccgacaagtctctatcaccaagccaataagggagttagagtcgcctactggataggctttgacaccaccccttttatgtttaagaacttggctggagcatatccatcatactctaccaactgggccgacgaaaccgtgttaacggctcgtaacataggcctatgcagctctgacgttatggagcggtcacgtagagggatgtccattcttagaaagaagtatttgaaaccatccaacaatgttctattctctgttggctcgaccatctaccacgagaagagggacttactgaggagctggcacctgccgtctgtatttcacttacgtggcaagcaaaattacacatgtcggtgtgagactatagttagttgcgacgggtacgtcgttaaaagaatagctatcagtccaggcctgtatgggaagccttcaggctatgctgctacgatgcaccgcgagggattcttgtgctgcaaagtgacagacacattgaacggggagagggtctcttttcccgtgtgcacgtatgtgccagctacattgtgtgaccaaatgactggcatactggcaacagatgtcagtgcggacgacgcgcaaaaactgctggttgggctcaaccagcgtatagtcgtcaacggtcgcacccagagaaacaccaataccatgaaaaattaccttttgcccgtagtggcccaggcatttgctaggtgggcaaaggaatataaggaagatcaagaagatgaaaggccactaggactacgagatagacagttagtcatggggtgttgttgggcttttagaaggcacaagataacatctatttataagcgcccggatacccaaaccatcatcaaagtgaacagcgatttccactcattcgtgctgcccaggataggcagtaacacattggagatcgggctgagaacaagaatcaggaaaatgttagaggagcacaaggagccgtcacctctcattaccgccgaggacgtacaagaagctaagtgcgcagccgatgaggctaaggaggtgcgtgaagccgaggagttgcgcgcagctctaccacctttggcagctgatgttgaggagcccactctggaagccgatgtcgacttgatgttacaagaggctggggccggctcagtggagacacctcgtggcttgataaaggttaccagctacgctggcgaggacaagatcggctcttacgctgtgctttctccgcaggctgtactcaagagtgaaaaattatcttgcatccaccctctcgctgaacaagtcatagtgataacacactctggccgaaaagggcgttatgccgtggaaccataccatggtaaagtagtggtgccagagggacatgcaatacccgtccaggactttcaagctctgagtgaaagtgccaccattgtgtacaacgaacgtgagttcgtaaacaggtacctgcaccatattgccacacatggaggagcgctgaacactgatgaagaatattacaaaactgtcaagcccagcgagcacgacggcgaatacctgtacgacatcgacaggaaacagtgcgtcaagaaagaactagtcactgggctagggctcacaggcgagctggtggatcctcccttccatgaattcgcctacgagagtctgagaacacgaccagccgctccttaccaagtaccaaccataggggtgtatggcgtgccaggatcaggcaagtctggcatcattaaaagcgcagtcaccaaaaaagatctagtggtgagcgccaagaaagaaaactgtgcagaaattataagggacgtcaagaaaatgaaagggctggacgtcaatgccagaactgtggactcagtgctcttgaatggatgcaaacaccccgtagagaccctgtatattgacgaagcttttgcttgtcatgcaggtactctcagagcgctcatagccattataagacctaaaaaggcagtgctctgcggggatcccaaacagtgcggtttttttaacatgatgtgcctgaaagtgcattttaaccacgagatttgcacacaagtcttccacaaaagcatctctcgccgttgcactaaatctgtgacttcggtcgtctcaaccttgttttacgacaaaaaaatgagaacgacgaatccgaaagagactaagattgtgattgacactaccggcagtaccaaacctaagcaggacgatctcattctcacttgtttcagagggtgggtgaagcagttgcaaatagattacaaaggcaacgaaataatgacggcagctgcctctcaagggctgacccgtaaaggtgtgtatgccgttcggtacaaggtgaatgaaaatcctctgtacgcacccacctcagaacatgtgaacgtcctactgacccgcacggaggaccgcatcgtgtggaaaacactagccggcgacccatggataaaaacactgactgccaagtaccctgggaatttcactgccacgatagaggagtggcaagcagagcatgatgccatcatgaggcacatcttggagagaccggaccctaccgacgtcttccagaataaggcaaacgtgtgttgggccaaggctttagtgccggtgctgaagaccgctggcatagacatgaccactgaacaatggaacactgtggattattttgaaacggacaaagctcactcagcagagatagtattgaaccaactatgcgtgaggttctttggactcgatctggactccggtctattttctgcacccactgttccgttatccattaggaataatcactgggataactccccgtcgcctaacatgtacgggctgaataaagaagtggtccgtcagctctctcgcaggtacccacaactgcctcgggcagttgccactggaagagtctatgacatgaacactggtacactgcgcaattatgatccgcgcataaacctagtacctgtaaacagaagactgcctcatgctttagtcctccaccataatgaacacccacagagtgacttttcttcattcgtcagcaaattgaagggcagaactgtcctggtggtcggggaaaagttgtccgtcccaggcaaaatggttgactggttgtcagaccggcctgaggctaccttcagagctcggctggatttaggcatcccaggtgatgtgcccaaatatgacataatatttgttaatgtgaggaccccatataaataccatcactatcagcagtgtgaagaccatgccattaagcttagcatgttgaccaagaaagcttgtctgcatctgaatcccggcggaacctgtgtcagcataggttatggttacgctgacagggccagcgaaagcatcattggtgctatagcgcggcagttcaagttttcccgggtatgcaaaccgaaatcctcacttgaagagacggaagttctgtttgtattcattgggtacgatcgcaaggcccgtacgcacaatccttacaagctttcatcaaccttgaccaacatttatacaggttccagactccacgaagccggatgtgcaccctcatatcatgtggtgcgaggggatattgccacggccaccgaaggagtgattataaatgctgctaacagcaaaggacaacctggcggaggggtgtgcggagcgctgtataagaaattcccggaaagcttcgatttacagccgatcgaagtaggaaaagcgcgactggtcaaaggtgcagctaaacatatcattcatgccgtaggaccaaacttcaacaaagtttcggaggttgaaggtgacaaacagttggcagaggcttatgagtccatcgctaagattgtcaacgataacaattacaagtcagtagcgattccactgttgtccaccggcatcttttccgggaacaaagatcgactaacccaatcattgaaccatttgctgacagctttagacaccactgatgcagatgtagccatatactgcagggacaagaaatgggaaatgactctcaaggaagcagtggctaggagagaagcagtggaggagatatgcatatccgacgactcttcagtgacagaacctgatgcagagctggtgagggtgcatccgaagagttctttggctggaaggaagggctacagcacaagcgatggcaaaactttctcatatttggaagggaccaagtttcaccaggcggccaaggatatagcagaaattaatgccatgtggcccgttgcaacggaggccaatgagcaggtatgcatgtatatcctcggagaaagcatgagcagtattaggtcgaaatgccccgtcgaagagtcggaagcctccacaccacctagcacgctgccttgcttgtgcatccatgccatgactccagaaagagtacagcgcctaaaagcctcacgtccagaacaaattactgtgtgctcatcctttccattgccgaagtatagaatcactggtgtgcagaagatccaatgctcccagcctatattgttctcaccgaaagtgcctgcgtatattcatccaaggaagtatctcgtggaaacaccaccggtagacgagactccggagccatcggcagagaaccaatccacagaggggacacctgaacaaccaccacttataaccgaggatgagaccaggactagaacgcctgagccgatcatcatcgaagaggaagaagaggatagcataagtttgctgtcagatggcccgacccaccaggtgctgcaagtcgaggcagacattcacgggccgccctctgtatctagctcatcctggtccattcctcatgcatccgactttgatgtggacagtttatccatacttgacaccctggagggagctagcgtgaccagcggggcaacgtcagccgagactaactcttacttcgcaaagagtatggagtttctggcgcgaccggtgcctgcgcctcgaacagtattcaggaaccctccacatcccgctccgcgcacaagaacaccgtcacttgcacccagcagggcctgctcgagaaccagcctagtttccaccccgccaggcgtgaatagggtgatcactagagaggagctcgaggcgcttaccccgtcacgcactcctagcaggtcggtctcgagaaccagcctggtctccaacccgccaggcgtaaatagggtgattacaagagaggagtttgaggcgttcgtagcacaacaacaatgacggtttgatgcgggtgcatacatcttttcctccgacaccggtcaagggcatttacaacaaaaatcagtaaggcaaacggtgctatccgaagtggtgttggagaggaccgaattggagatttcgtatgccccgcgcctcgaccaagaaaaagaagaattactacgcaagaaattacagttaaatcccacacctgctaacagaagcagataccagtccaggaaggtggagaacatgaaagccataacagctagacgtattctgcaaggcctagggcattatttgaaggcagaaggaaaagtggagtgctaccgaaccctgcatcctgttcctttgtattcatctagtgtgaaccgtgccttttcaagccccaaggtcgcagtggaagcctgtaacgccatgttgaaagagaactttccgactgtggcttcttactgtattattccagagtacgatgcctatttggacatggttgacggagcttcatgctgcttagacactgccagtttttgccctgcaaagctgcgcagctttccaaagaaacactcctatttggaacccacaatacgatcggcagtgccttcagcgatccagaacacgctccagaacgtcctggcagctgccacaaaaagaaattgcaatgtcacgcaaatgagagaattgcccgtattggattcggcggcctttaatgtggaatgcttcaagaaatatgcgtgtaataatgaatattgggaaacgtttaaagaaaaccccatcaggcttactgaagaaaacgtggtaaattacattaccaaattaaaaggaccaaaagctgctgctctttttgcgaagacacataatttgaatatgttgcaggacataccaatggacaggtttgtaatggacttaaagagagacgtgaaagtgactccaggaacaaaacatactgaagaacggcccaaggtacaggtgatccaggctgccgatccgctagcaacagcgtatctgtgcggaatccaccgagagctggttaggagattaaatgcggtcctgcttccgaacattcatacactgtttgatatgtcggctgaagactttgacgctattatagccgagcacttccagcctggggattgtgttctggaaactgacatcgcgtcgtttgataaaagtgaggacgacgccatggctctgaccgcgttaatgattctggaagacttaggtgtggacgcagagctgttgacgctgattgaggcggctttcggcgaaatttcatcaatacatttgcccactaaaactaaatttaaattcggagccatgatgaaatctggaatgttcctcacactgtttgtgaacacagtcattaacattgtaatcgcaagcagagtgttgagagaacggctaaccggatcaccatgtgcagcattcattggagatgacaatatcgtgaaaggagtcaaatcggacaaattaatggcagacaggtgcgccacctggttgaatatggaagtcaagattatagatgctgtggtgggcgagaaagcgccttatttctgtggagggtttattttgtgtgactccgtgaccggcacagcgtgccgtgtggcagaccccctaaaaaggctgtttaagcttggcaaacctctggcagcagacgatgaacatgatgatgacaggagaagggcattgcatgaagagtcaacacgctggaaccgagtgggtattctttcagagctgtgcaaggcagtagaatcaaggtatgaaaccgtaggaacttccatcatagttatggccatgactactctagctagcagtgttaaatcattcagctacctgagaggggcccctataactctctacggctaacctgaatggactacgacatagtctagtccgccaagatgttcccgttccagccaatgtatccgatgcagccaatgccctatcgcaacccgttcgcggccccgcgcaggccctggttccccagaaccgacccttttctggcgatgcaggtgcaggaattaacccgctcgatggctaacctgacgttcaagcaacgccgggacgcgccacctgaggggccatccgctaagaaaccgaagaaggaggcctcgcaaaaacagaaagggggaggccaagggaagaagaagaagaaccaagggaagaagaaggctaagacagggccgcctaatccgaaggcacagaatggaaacaagaagaagaccaacaagaaaccaggcaagagacagcgcatggtcatgaaattggaatctgacaagacgttcccaatcatgttggaagggaagataaacggctacgcttgtgtggtcggagggaagttattcaggccgatgcatgtggaaggcaagatcgacaacgacgttctggccgcgcttaagacgaagaaagcatccaaatacgatcttgagtatgcagatgtgccacagaacatgcgggccgatacattcaaatacacccatgagaaaccccaaggctattacagctggcatcatggagcagtccaatatgaaaatgggcgtttcacggtgccgaaaggagttggggccaagggagacagcggacgacccattctggataaccagggacgggtggtcgctattgtgctgggaggtgtgaatgaaggatctaggacagccctttcagtcgtcatgtggaacgagaagggagttaccgtgaagtatactccggagaactgcgagcaatggtcactagtgaccaccatgtgtctgctcgccaatgtgacgttcccatgtgctcaaccaccaatttgctacgacagaaaaccagcagagactttggccatgctcagcgttaacgttgacaacccgggctacgatgagctgctggaagcagctgttaagtgccccggaaggaaaaggagatccaccgaggagctgtttaaggagtataagctaacgcgcccttacatggccagatgcatcagatgtgcagttgggagctgccatagtccaatagcaatcgaggcagtaaagagcgacgggcacgacggttatgttagacttcagacttcctcgcagtatggcctggattcctccggcaacttaaagggcaggaccatgcggtatgacatgcacgggaccattaaagagataccactacatcaagtgtcactccatacatctcgcccgtgtcacattgtggatgggcacggttatttcctgcttgccaggtgcccggcaggggactccatcaccatggaatttaagaaagattccgtcacacactcctgctcggtgccgtatgaagtgaaatttaatcctgtaggcagagaactctatactcatcccccagaacacggagtagagcaagcgtgccaagtctacgcacatgatgcacagaacagaggagcttatgtcgagatgcacctcccgggctcagaagtggacagcagtttggtttccttgagcggcagttcagtcaccgtgacacctcctgttgggactagcgccctggtggaatgcgagtgtggcggcacaaagatctccgagaccatcaacaagacaaaacagttcagccagtgcacaaagaaggagcagtgcagagcatatcggctgcagaacgataagtgggtgtataattctgacaaactgcccaaagcagcgggagccaccttaaaaggaaaactgcatgtcccattcttgctggcagacggcaaatgcaccgtgcctctagcaccagaacctatgataacctttggtttcagatcagtgtcactgaaactgcaccctaagaatcccacatatctaaccacccgccaacttgctgatgagcctcactacacgcacgagctcatatctgaaccagctgttaggaattttaccgtcaccgaaaaagggtgggagtttgtatggggaaaccacccgccgaaaaggttttgggcacaggaaacagcacccggaaatccacatgggctaccgcacgaggtgataactcattattaccacagataccctatgtccaccatcctgggtttgtcaatttgtgccgccattgcaaccgtttccgttgcagcgtctacctggctgttttgcagatctagagttgcgtgcctaactccttaccggctaacacctaacgctaggataccattttgtctggctgtgctttgctgcgcccgcactgcccgggccgagaccacctgggagtccttggatcacctatggaacaataaccaacagatgttctggattcaattgctgatccctctggccgccttgatcgtagtgactcgcctgctcaggtgcgtgtgctgtgtcgtgccttttttagtcatggccggcgccgcaggcgccggcgcctacgagcacgcgaccacgatgccgagccaagcgggaatctcgtataacactatagtcaacagagcaggctacgcaccactccctatcagcataacaccaacaaagatcaagctgatacctacagtgaacttggagtacgtcacctgccactacaaaacaggaatggattcaccagccatcaaatgctgcggatctcaggaatgcactccaacttacaggcctgatgaacagtgcaaagtcttcacaggggtttacccgttcatgtggggtggtgcatattgcttttgcgacactgagaacacccaagtcagcaaggcctacgtaatgaaatctgacgactgccttgcggatcatgctgaagcatataaagcgcacacagcctcagtgcaggcgttcctcaacatcacagtgggagaacactctattgtgactaccgtgtatgtgaatggagaaactcctgtgaatttcaatggggtcaaattaactgcaggtccgctttccacagcttggacaccctttgatcgcaaaatcgtgcagtatgccggggagatctataattatgattttcctgagtatggggcaggacaaccaggagcatttggagatatacaatccagaacagtctcaagctcagatctgtatgccaataccaacctagtgctgcagagacccaaagcaggagcgatccacgtgccatacactcaggcaccttcgggttttgagcaatggaagaaagataaagctccatcattgaaatttaccgcccctttcggatgcgaaatatatacaaaccccattcgcgccgaaaactgtgctgtagggtcaattccattagcctttgacattcccgacgccttgttcaccagggtgtcagaaacaccgacactttcagcggccgaatgcactcttaacgagtgcgtgtattcttccgactttggtgggatcgccacggtcaagtactcggccagcaagtcaggcaagtgcgcagtccatgtgccatcagggactgctaccctaaaagaagcagcagtcgagctaaccgagcaagggtcggcgactatccatttctcgaccgcaaatatccacccggagttcaggctccaaatatgcacatcatatgttacgtgcaaaggtgattgtcaccccccgaaagaccatattgtgacacaccctcagtatcacgcccaaacatttacagccgcggtgtcaaaaaccgcgtggacgtggttaacatccctgctgggaggatcagccgtaattattataattggcttggtgctggctactattgtggccatgtacgtgctgaccaaccagaaacataattgaatacagcagcaattggcaagctgcttacatagaactcgcggcgattggcatgccgccttaaaatttttattttattttttcttttcttttccgaatcggattttgtttttaatatttc

SEQ ID NO: 4 - skipped

SEQ ID NO: 5 - RNA, 11446 nt, Venezuelan equine encephalitis virus
  source 1..11446: mol_type = other RNA
ataggcggcgcatgagagaagcccagaccaattacctacccaaaatggagaaagttcacgttgacatcgaggaagacagcccattcctcagagctttgcagcggagcttcccgcagtttgaggtagaagccaagcaggtcactgataatgaccatgctaatgccagagcgttttcgcatctggcttcaaaactgatcgaaacggaggtggacccatccgacacgatccttgacattggaagtgcgcccgcccgcagaatgtattctaagcacaagtatcattgtatctgtccgatgagatgtgcggaagatccggacagattgtataagtatgcaactaagctgaagaaaaactgtaaggaaataactgataaggaattggacaagaaaatgaaggagctcgccgccgtcatgagcgaccctgacctggaaactgagactatgtgcctccacgacgacgagtcgtgtcgctacgaagggcaagtcgctgtttaccaggatgtatacgcggttgacggaccgacaagtctctatcaccaagccaataagggagttagagtcgcctactggataggctttgacaccaccccttttatgtttaagaacttggctggagcatatccatcatactctaccaactgggccgacgaaaccgtgttaacggctcgtaacataggcctatgcagctctgacgttatggagcggtcacgtagagggatgtccattcttagaaagaagtatttgaaaccatccaacaatgttctattctctgttggctcgaccatctaccacgagaagagggacttactgaggagctggcacctgccgtctgtatttcacttacgtggcaagcaaaattacacatgtcggtgtgagactatagttagttgcgacgggtacgtcgttaaaagaatagctatcagtccaggcctgtatgggaagccttcaggctatgctgctacgatgcaccgcgagggattcttgtgctgcaaagtgacagacacattgaacggggagagggtctcttttcccgtgtgcacgtatgtgccagctacattgtgtgaccaaatgactggcatactggcaacagatgtcagtgcggacgacgcgcaaaaactgctggttgggctcaaccagcgtatagtcgtcaacggtcgcacccagagaaacaccaataccatgaaaaattaccttttgcccgtagtggcccaggcatttgctaggtgggcaaaggaatataaggaagatcaagaagatgaaaggccactaggactacgagatagacagttagtcatggggtgttgttgggcttttagaaggcacaagataacatctatttataagcgcccggatacccaaaccatcatcaaagtgaacagcgatttccactcattcgtgctgcccaggataggcagtaacacattggagatcgggctgagaacaagaatcaggaaaatgttagaggagcacaaggagccgtcacctctcattaccgccgaggacgtacaagaagctaagtgcgcagccgatgaggctaaggaggtgcgtgaagccgaggagttgcgcgcagctctaccacctttggcagctgatgttgaggagcccactctggaagccgatgtcgacttgatgttacaagaggctggggccggctcagtggagacacctcgtggcttgataaaggttaccagctacgatggcgaggacaagatcggctcttacgctgtgctttctccgcaggctgtactcaagagtgaaaaattatcttgcatccaccctctcgctgaacaagtcatagtgataacacactctggccgaaaagggcgttatgccgtggaaccataccatggtaaagtagtggtgccagagggacatgcaatacccgtccaggactttcaagctctgagtgaaagtgccaccattgtgtacaacgaacgtgagttcgtaaacaggtacctgcaccatattgccacacatggaggagcgctgaacactgatgaagaatattacaaaactgtcaagcccagcgagcacgacggcgaatacctgtacgacatcgacaggaaacagtgcgtcaagaaagaactagtcactgggctagggctcacaggcgagctggtggatcctcccttccatgaattcgcctacgagagtctgagaacacgaccagccgctccttaccaagtaccaaccataggggtgtatggcgtgccaggatcaggcaagtctggcatcattaaaagcgcagtcaccaaaaaagatctagtggtgagcgccaagaaagaaaactgtgcagaaattataagggacgtcaagaaaatgaaagggctggacgtcaatgccagaactgtggactcagtgctcttgaatggatgcaaacaccccgtagagaccctgtatattgacgaagcttttgcttgtcatgcaggtactctcagagcgctcatagccattataagacctaaaaaggcagtgctctgcggggatcccaaacagtgcggtttttttaacatgatgtgcctgaaagtgcattttaaccacgagatttgcacacaagtcttccacaaaagcatctctcgccgttgcactaaatctgtgacttcggtcgtctcaaccttgttttacgacaaaaaaatgagaacgacgaatccgaaagagactaagattgtgattgacactaccggcagtaccaaacctaagcaggacgatctcattctcacttgtttcagagggtgggtgaagcagttgcaaatagattacaaaggcaacgaaataatgacggcagctgcctctcaagggctgacccgtaaaggtgtgtatgccgttcggtacaaggtgaatgaaaatcctctgtacgcacccacctcagaacatgtgaacgtcctactgacccgcacggaggaccgcatcgtgtggaaaacactagccggcgacccatggataaaaacactgactgccaagtaccctgggaatttcactgccacgatagaggagtggcaagcagagcatgatgccatcatgaggcacatcttggagagaccggaccctaccgacgtcttccagaataaggcaaacgtgtgttgggccaaggctttagtgccggtgctgaagaccgctggcatagacatgaccactgaacaatggaacactgtggattattttgaaacggacaaagctcactcagcagagatagtattgaaccaactatgcgtgaggttctttggactcgatctggactccggtctattttctgcacccactgttccgttatccattaggaataatcactgggataactccccgtcgcctaacatgtacgggctgaataaagaagtggtccgtcagctctctcgcaggtacccacaactgcctcgggcagttgccactggaagagtctatgacatgaacactggtacactgcgcaattatgatccgcgcataaacctagtacctgtaaacagaagactgcctcatgctttagtcctccaccataatgaacacccacagagtgacttttcttcattcgtcagcaaattgaagggcagaactgtcctggtggtcggggaaaagttgtccgtcccaggcaaaatggttgactggttgtcagaccggcctgaggctaccttcagagctcggctggatttaggcatcccaggtgatgtgcccaaatatgacataatatttgttaatgtgaggaccccatataaataccatcactatcagcagtgtgaagaccatgccattaagcttagcatgttgaccaagaaagcttgtctgcatctgaatcccggcggaacctgtgtcagcataggttatggttacgctgacagggccagcgaaagcatcattggtgctatagcgcggcagttcaagttttcccgggtatgcaaaccgaaatcctcacttgaagagacggaagttctgtttgtattcattgggtacgatcgcaaggcccgtacgcacaatccttacaagctttcatcaaccttgaccaacatttatacaggttccagactccacgaagccggatgtgcaccctcatatcatgtggtgcgaggggatattgccacggccaccgaaggagtgattataaatgctgctaacagcaaaggacaacctggcggaggggtgtgcggagcgctgtataagaaattcccggaaagcttcgatttacagccgatcgaagtaggaaaagcgcgactggtcaaaggtgcagctaaacatatcattcatgccgtaggaccaaacttcaacaaagtttcggaggttgaaggtgacaaacagttggcagaggcttatgagtccatcgctaagattgtcaacgataacaattacaagtcagtagcgattccactgttgtccaccggcatcttttccgggaacaaagatcgactaacccaatcattgaaccatttgctgacagctttagacaccactgatgcagatgtagccatatactgcagggacaagaaatgggaaatgactctcaaggaagcagtggctaggagagaagcagtggaggagatatgcatatccgacgactcttcagtgacagaacctgatgcagagctggtgagggtgcatccgaagagttctttggctggaaggaagggctacagcacaagcgatggcaaaactttctcatatttggaagggaccaagtttcaccaggcggccaaggatatagcagaaattaatgccatgtggcccgttgcaacggaggccaatgagcaggtatgcatgtatatcctcggagaaagcatgagcagtattaggtcgaaatgccccgtcgaagagtcggaagcctccacaccacctagcacgctgccttgcttgtgcatccatgccatgactccagaaagagtacagcgcctaaaagcctcacgtccagaacaaattactgtgtgctcatcctttccattgccgaagtatagaatcactggtgtgcagaagatccaatgctcccagcctatattgttctcaccgaaagtgcctgcgtatattcatccaaggaagtatctcgtggaaacaccaccggtagacgagactccggagccatcggcagagaaccaatccacagaggggacacctgaacaaccaccacttataaccgaggatgagaccaggactagaacgcctgagccgatcatcatcgaagaggaagaagaggatagcataagtttgctgtcagatggcccgacccaccaggtgctgcaagtcgaggcagacattcacgggccgccctctgtatctagctcatcctggtccattcctcatgcatccgactttgatgtggacagtttatccatacttgacaccctggagggagctagcgtgaccagcggggcaacgtcagccgagactaactcttacttcgcaaagagtatggagtttctggcgcgaccggtgcctgcgcctcgaacagtattcaggaaccctccacatcccgctccgcgcacaagaacaccgtcacttgcacccagcagggcctgctcgagaaccagcctagtttccaccccgccaggcgtgaatagggtgatcactagagaggagctcgaggcgcttaccccgtcacgcactcctagcaggtcggtctcgagaaccagcctggtctccaacccgccaggcgtaaatagggtgattacaagagaggagtttgaggcgttcgtagcacaacaacaatgacggtttgatgcgggtgcatacatcttttcctccgacaccggtcaagggcatttacaacaaaaatcagtaaggcaaacggtgctatccgaagtggtgttggagaggaccgaattggagatttcgtatgccccgcgcctcgaccaagaaaaagaagaattactacgcaagaaattacagttaaatcccacacctgctaacagaagcagataccagtccaggaaggtggagaacatgaaagccataacagctagacgtattctgcaaggcctagggcattatttgaaggcagaaggaaaagtggagtgctaccgaaccctgcatcctgttcctttgtattcatctagtgtgaaccgtgccttttcaagccccaaggtcgcagtggaagcctgtaacgccatgttgaaagagaactttccgactgtggcttcttactgtattattccagagtacgatgcctatttggacatggttgacggagcttcatgctgcttagacactgccagtttttgccctgcaaagctgcgcagctttccaaagaaacactcctatttggaacccacaatacgatcggcagtgccttcagcgatccagaacacgctccagaacgtcctggcagctgccacaaaaagaaattgcaatgtcacgcaaatgagagaattgcccgtattggattcggcggcctttaatgtggaatgcttcaagaaatatgcgtgtaataatgaatattgggaaacgtttaaagaaaaccccatcaggcttactgaagaaaacgtggtaaattacattaccaaattaaaaggaccaaaagctgctgctctttttgcgaagacacataatttgaatatgttgcaggacataccaatggacaggtttgtaatggacttaaagagagacgtgaaagtgactccaggaacaaaacatactgaagaacggcccaaggtacaggtgatccaggctgccgatccgctagcaacagcgtatctgtgcggaatccaccgagagctggttaggagattaaatgcggtcctgcttccgaacattcatacactgtttgatatgtcggctgaagactttgacgctattatagccgagcacttccagcctggggattgtgttctggaaactgacatcgcgtcgtttgataaaagtgaggacgacgccatggctctgaccgcgttaatgattctggaagacttaggtgtggacgcagagctgttgacgctgattgaggcggctttcggcgaaatttcatcaatacatttgcccactaaaactaaatttaaattcggagccatgatgaaatctggaatgttcctcacactgtttgtgaacacagtcattaacattgtaatcgcaagcagagtgttgagagaacggctaaccggatcaccatgtgcagcattcattggagatgacaatatcgtgaaaggagtcaaatcggacaaattaatggcagacaggtgcgccacctggttgaatatggaagtcaagattatagatgctgtggtgggcgagaaagcgccttatttctgtggagggtttattttgtgtgactccgtgaccggcacagcgtgccgtgtggcagaccccctaaaaaggctgtttaagcttggcaaacctctggcagcagacgatgaacatgatgatgacaggagaagggcattgcatgaagagtcaacacgctggaaccgagtgggtattctttcagagctgtgcaaggcagtagaatcaaggtatgaaaccgtaggaacttccatcatagttatggccatgactactctagctagcagtgttaaatcattcagctacctgagaggggcccctataactctctacggctaacctgaatggactacgacatagtctagtccgccaagatgttcccgttccagccaatgtatccgatgcagccaatgccctatcgcaacccgttcgcggccccgcgcaggccctggttccccagaaccgacccttttctggcgatgcaggtgcaggaattaacccgctcgatggctaacctgacgttcaagcaacgccgggacgcgccacctgaggggccatccgctaagaaaccgaagaaggaggcctcgcaaaaacagaaagggggaggccaagggaagaagaagaagaaccaagggaagaagaaggctaagacagggccgcctaatccgaaggcacagaatggaaacaagaagaagaccaacaagaaaccaggcaagagacagcgcatggtcatgaaattggaatctgacaagacgttcccaatcatgttggaagggaagataaacggctacgcttgtgtggtcggagggaagttattcaggccgatgcatgtggaaggcaagatcgacaacgacgttctggccgcgcttaagacgaagaaagcatccaaatacgatcttgagtatgcagatgtgccacagaacatgcgggccgatacattcaaatacacccatgagaaaccccaaggctattacagctggcatcatggagcagtccaatatgaaaatgggcgtttcacggtgccgaaaggagttggggccaagggagacagcggacgacccattctggataaccagggacgggtggtcgctattgtgctgggaggtgtgaatgaaggatctaggacagccctttcagtcgtcatgtggaacgagaagggagttaccgtgaagtatactccggagaactgcgagcaatggtcactagtgaccaccatgtgtctgctcgccaatgtgacgttcccatgtgctcaaccaccaatttgctacgacagaaaaccagcagagactttggccatgctcagcgttaacgttgacaacccgggctacgatgagctgctggaagcagctgttaagtgccccggaaggaaaaggagatccaccgaggagctgtttaatgagtataagctaacgcgcccttacatggccagatgcatcagatgtgcagttgggagctgccatagtccaatagcaatcgaggcagtaaagagcgacgggcacgacggttatgttagacttcagacttcctcgcagtatggcctggattcctccggcaacttaaagggcaggaccatgcggtatgacatgcacgggaccattaaagagataccactacatcaagtgtcactctatacatctcgcccgtgtcacattgtggatgggcacggttatttcctgcttgccaggtgcccggcaggggactccatcaccatggaatttaagaaagattccgtcagacactcctgctcggtgccgtatgaagtgaaatttaatcctgtaggcagagaactctatactcatcccccagaacacggagtagagcaagcgtgccaagtctacgcacatgatgcacagaacagaggagcttatgtcgagatgcacctcccgggctcagaagtggacagcagtttggtttccttgagcggcagttcagtcaccgtgacacctcctgatgggactagcgccctggtggaatgcgagtgtggcggcacaaagatctccgagaccatcaacaagacaaaacagttcagccagtgcacaaagaaggagcagtgcagagcatatcggctgcagaacgataagtgggtgtataattctgacaaactgcccaaagcagcgggagccaccttaaaaggaaaactgcatgtcccattcttgctggcagacggcaaatgcaccgtgcctctagcaccagaacctatgataaccttcggtttcagatcagtgtcactgaaactgcaccctaagaatcccacatatctaatcacccgccaacttgctgatgagcctcactacacgcacgagctcatatctgaaccagctgttaggaattttaccgtcaccgaaaaagggtgggagtttgtatggggaaaccacccgccgaaaaggttttgggcacaggaaacagcacccggaaatccacatgggctaccgcacgaggtgataactcattattaccacagataccctatgtccaccatcctgggtttgtcaatttgtgccgccattgcaaccgtttccgttgcagcgtctacctggctgttttgcagatctagagttgcgtgcctaactccttaccggctaacacctaacgctaggataccattttgtctggctgtgctttgctgcgcccgcactgcccgggccgagaccacctgggagtccttggatcacctatggaacaataaccaacagatgttctggattcaattgctgatccctctggccgccttgatcgtagtgactcgcctgctcaggtgcgtgtgctgtgtcgtgccttttttagtcatggccggcgccgcaggcgccggcgcctacgagcacgcgaccacgatgccgagccaagcgggaatctcgtataacactatagtcaacagagcaggctacgcaccactccctatcagcataacaccaacaaagatcaagctgatacctacagtgaacttggagtacgtcacctgccactacaaaacaggaatggattcaccagccatcaaatgctgcggatctcaggaatgcactccaacttacaggcctgatgaacagtgcaaagtcttcacaggggtttacccgttcatgtggggtggtgcatattgcttttgcgacactgagaacacccaagtcagcaaggcctacgtaatgaaatctgacgactgccttgcggatcatgctgaagcatataaagcgcacacagcctcagtgcaggcgttcctcaacatcacagtgggagaacactctattgtgactaccgtgtatgtgaatggagaaactcctgtgaatttcaatggggtcaaaataactgcaggtccgctttccacagcttggacaccctttgatcgcaaaatcgtgcagtatgccggggagatctataattatgattttcctgagtatggggcaggacaaccaggagcatttggagatatacaatccagaacagtctcaagctctgatctgtatgccaataccaacctagtgctgcagagacccaaagcaggagcgatccacgtgccatacactcaggcaccttcgggttttgagcaatggaagaaagataaagctccatcattgaaatttaccgcccctttcggatgcgaaatatatacaaaccccattcgcgccgaaaactgtgctgtagggtcaattccattagcctttgacattcccgacgccttgttcaccagggtgtcagaaacaccgacactttcagcggccgaatgcactcttaacgagtgcgtgtattcttccgactttggtgggatcgccacggtcaagtactcggccagcaagtcaggcaagtgcgcagtccatgtgccatcagggactgctaccctaaaagaagcagcagtcgagctaaccgagcaagggtcggcgactatccatttctcgaccgcaaatatccacccggagttcaggctccaaatatgcacatcatatgttacgtgcaaaggtgattgtcaccccccgaaagaccatattgtgacacaccctcagtatcacgcccaaacatttacagccgcggtgtcaaaaaccgcgtggacgtggttaacatccctgctgggaggatcagccgtaattattataattggcttggtgctggctactattgtggccatgtacgtgctgaccaaccagaaacataattgaatacagcagcaattggcaagctgcttacatagaactcgcggcgattggcatgccgccttaaaatttttattttatttttcttttcttttccgaatcggattttgtttttaatatttc

SEQ ID NO: 6 - DNA, 7895 bp, Venezuelan equine encephalitis virus
  source 1..7895: mol_type = other DNA
atgggcggcgcatgagagaagcccagaccaattacctacccaaaatggagaaagttcacgttgacatcgaggaagacagcccattcctcagagctttgcagcggagcttcccgcagtttgaggtagaagccaagcaggtcactgataatgaccatgctaatgccagagcgttttcgcatctggcttcaaaactgatcgaaacggaggtggacccatccgacacgatccttgacattggaagtgcgcccgcccgcagaatgtattctaagcacaagtatcattgtatctgtccgatgagatgtgcggaagatccggacagattgtataagtatgcaactaagctgaagaaaaactgtaaggaaataactgataaggaattggacaagaaaatgaaggagctcgccgccgtcatgagcgaccctgacctggaaactgagactatgtgcctccacgacgacgagtcgtgtcgctacgaagggcaagtcgctgtttaccaggatgtatacgcggttgacggaccgacaagtctctatcaccaagccaataagggagttagagtcgcctactggataggctttgacaccaccccttttatgtttaagaacttggctggagcatatccatcatactctaccaactgggccgacgaaaccgtgttaacggctcgtaacataggcctatgcagctctgacgttatggagcggtcacgtagagggatgtccattcttagaaagaagtatttgaaaccatccaacaatgttctattctctgttggctcgaccatctaccacgagaagagggacttactgaggagctggcacctgccgtctgtatttcacttacgtggcaagcaaaattacacatgtcggtgtgagactatagttagttgcgacgggtacgtcgttaaaagaatagctatcagtccaggcctgtatgggaagccttcaggctatgctgctacgatgcaccgcgagggattcttgtgctgcaaagtgacagacacattgaacggggagagggtctcttttcccgtgtgcacgtatgtgccagctacattgtgtgaccaaatgactggcatactggcaacagatgtcagtgcggacgacgcgcaaaaactgctggttgggctcaaccagcgtatagtcgtcaacggtcgcacccagagaaacaccaataccatgaaaaattaccttttgcccgtagtggcccaggcatttgctaggtgggcaaaggaatataaggaagatcaagaagatgaaaggccactaggactacgagatagacagttagtcatggggtgttgttgggcttttagaaggcacaagataacatctatttataagcgcccggatacccaaaccatcatcaaagtgaacagcgatttccactcattcgtgctgcccaggataggcagtaacacattggagatcgggctgagaacaagaatcaggaaaatgttagaggagcacaaggagccgtcacctctcattaccgccgaggacgtacaagaagctaagtgcgcagccgatgaggctaaggaggtgcgtgaagccgaggagttgcgcgcagctctaccacctttggcagctgatgttgaggagcccactctggaagccgatgtcgacttgatgttacaagaggctggggccggctcagtggagacacctcgtggcttgataaaggttaccagctacgctggcgaggacaagatcggctcttacgctgtgctttctccgcaggctgtactcaagagtgaaaaattatcttgcatccaccctctcgctgaacaagtcatagtgataacacactctggccgaaaagggcgttatgccgtggaaccataccatggtaaagtagtggtgccagagggacatgcaatacccgtccaggactttcaagctctgagtgaaagtgccaccattgtgtacaacgaacgtgagttcgtaaacaggtacctgcaccatattgccacacatggaggagcgctgaacactgatgaagaatattacaaaactgtcaagcccagcgagcacgacggcgaatacctgtacgacatcgacaggaaacagtgcgtcaagaaagaactagtcactgggctagggctcacaggcgagctggtggatcctcccttccatgaattcgcctacgagagtctgagaacacgaccagccgctccttaccaagtaccaaccataggggtgtatggcgtgccaggatcaggcaagtctggcatcattaaaagcgcagtcaccaaaaaagatctagtggtgagcgccaagaaagaaaactgtgcagaaattataagggacgtcaagaaaatgaaagggctggacgtcaatgccagaactgtggactcagtgctcttgaatggatgcaaacaccccgtagagaccctgtatattgacgaagcttttgcttgtcatgcaggtactctcagagcgctcatagccattataagacctaaaaaggcagtgctctgcggggatcccaaacagtgcggtttttttaacatgatgtgcctgaaagtgcattttaaccacgagatttgcacacaagtcttccacaaaagcatctctcgccgttgcactaaatctgtgacttcggtcgtctcaaccttgttttacgacaaaaaaatgagaacgacgaatccgaaagagactaagattgtgattgacactaccggcagtaccaaacctaagcaggacgatctcattctcacttgtttcagagggtgggtgaagcagttgcaaatagattacaaaggcaacgaaataatgacggcagctgcctctcaagggctgacccgtaaaggtgtgtatgccgttcggtacaaggtgaatgaaaatcctctgtacgcacccacctcagaacatgtgaacgtcctactgacccgcacggaggaccgcatcgtgtggaaaacactagccggcgacccatggataaaaacactgactgccaagtaccctgggaatttcactgccacgatagaggagtggcaagcagagcatgatgccatcatgaggcacatcttggagagaccggaccctaccgacgtcttccagaataaggcaaacgtgtgttgggccaaggctttagtgccggtgctgaagaccgctggcatagacatgaccactgaacaatggaacactgtggattattttgaaacggacaaagctcactcagcagagatagtattgaaccaactatgcgtgaggttctttggactcgatctggactccggtctattttctgcacccactgttccgttatccattaggaataatcactgggataactccccgtcgcctaacatgtacgggctgaataaagaagtggtccgtcagctctctcgcaggtacccacaactgcctcgggcagttgccactggaagagtctatgacatgaacactggtacactgcgcaattatgatccgcgcataaacctagtacctgtaaacagaagactgcctcatgctttagtcctccaccataatgaacacccacagagtgacttttcttcattcgtcagcaaattgaagggcagaactgtcctggtggtcggggaaaagttgtccgtcccaggcaaaatggttgactggttgtcagaccggcctgaggctaccttcagagctcggctggatttaggcatcccaggtgatgtgcccaaatatgacataatatttgttaatgtgaggaccccatataaataccatcactatcagcagtgtgaagaccatgccattaagcttagcatgttgaccaagaaagcttgtctgcatctgaatcccggcggaacctgtgtcagcataggttatggttacgctgacagggccagcgaaagcatcattggtgctatagcgcggcagttcaagttttcccgggtatgcaaaccgaaatcctcacttgaagagacggaagttctgtttgtattcattgggtacgatcgcaaggcccgtacgcacaatccttacaagctttcatcaaccttgaccaacatttatacaggttccagactccacgaagccggatgtgcaccctcatatcatgtggtgcgaggggatattgccacggccaccgaaggagtgattataaatgctgctaacagcaaaggacaacctggcggaggggtgtgcggagcgctgtataagaaattcccggaaagcttcgatttacagccgatcgaagtaggaaaagcgcgactggtcaaaggtgcagctaaacatatcattcatgccgtaggaccaaacttcaacaaagtttcggaggttgaaggtgacaaacagttggcagaggcttatgagtccatcgctaagattgtcaacgataacaattacaagtcagtagcgattccactgttgtccaccggcatcttttccgggaacaaagatcgactaacccaatcattgaaccatttgctgacagctttagacaccactgatgcagatgtagccatatactgcagggacaagaaatgggaaatgactctcaaggaagcagtggctaggagagaagcagtggaggagatatgcatatccgacgactcttcagtgacagaacctgatgcagagctggtgagggtgcatccgaagagttctttggctggaaggaagggctacagcacaagcgatggcaaaactttctcatatttggaagggaccaagtttcaccaggcggccaaggatatagcagaaattaatgccatgtggcccgttgcaacggaggccaatgagcaggtatgcatgtatatcctcggagaaagcatgagcagtattaggtcgaaatgccccgtcgaagagtcggaagcctccacaccacctagcacgctgccttgcttgtgcatccatgccatgactccagaaagagtacagcgcctaaaagcctcacgtccagaacaaattactgtgtgctcatcctttccattgccgaagtatagaatcactggtgtgcagaagatccaatgctcccagcctatattgttctcaccgaaagtgcctgcgtatattcatccaaggaagtatctcgtggaaacaccaccggtagacgagactccggagccatcggcagagaaccaatccacagaggggacacctgaacaaccaccacttataaccgaggatgagaccaggactagaacgcctgagccgatcatcatcgaagaggaagaagaggatagcataagtttgctgtcagatggcccgacccaccaggtgctgcaagtcgaggcagacattcacgggccgccctctgtatctagctcatcctggtccattcctcatgcatccgactttgatgtggacagtttatccatacttgacaccctggagggagctagcgtgaccagcggggcaacgtcagccgagactaactcttacttcgcaaagagtatggagtttctggcgcgaccggtgcctgcgcctcgaacagtattcaggaaccctccacatcccgctccgcgcacaagaacaccgtcacttgcacccagcagggcctgctcgagaaccagcctagtttccaccccgccaggcgtgaatagggtgatcactagagaggagctcgaggcgcttaccccgtcacgcactcctagcaggtcggtctcgagaaccagcctggtctccaacccgccaggcgtaaatagggtgattacaagagaggagtttgaggcgttcgtagcacaacaacaatgacggtttgatgcgggtgcatacatcttttcctccgacaccggtcaagggcatttacaacaaaaatcagtaaggcaaacggtgctatccgaagtggtgttggagaggaccgaattggagatttcgtatgccccgcgcctcgaccaagaaaaagaagaattactacgcaagaaattacagttaaatcccacacctgctaacagaagcagataccagtccaggaaggtggagaacatgaaagccataacagctagacgtattctgcaaggcctagggcattatttgaaggcagaaggaaaagtggagtgctaccgaaccctgcatcctgttcctttgtattcatctagtgtgaaccgtgccttttcaagccccaaggtcgcagtggaagcctgtaacgccatgttgaaagagaactttccgactgtggcttcttactgtattattccagagtacgatgcctatttggacatggttgacggagcttcatgctgcttagacactgccagtttttgccctgcaaagctgcgcagctttccaaagaaacactcctatttggaacccacaatacgatcggcagtgccttcagcgatccagaacacgctccagaacgtcctggcagctgccacaaaaagaaattgcaatgtcacgcaaatgagagaattgcccgtattggattcggcggcctttaatgtggaatgcttcaagaaatatgcgtgtaataatgaatattgggaaacgtttaaagaaaaccccatcaggcttactgaagaaaacgtggtaaattacattaccaaattaaaaggaccaaaagctgctgctctttttgcgaagacacataatttgaatatgttgcaggacataccaatggacaggtttgtaatggacttaaagagagacgtgaaagtgactccaggaacaaaacatactgaagaacggcccaaggtacaggtgatccaggctgccgatccgctagcaacagcgtatctgtgcggaatccaccgagagctggttaggagattaaatgcggtcctgcttccgaacattcatacactgtttgatatgtcggctgaagactttgacgctattatagccgagcacttccagcctggggattgtgttctggaaactgacatcgcgtcgtttgataaaagtgaggacgacgccatggctctgaccgcgttaatgattctggaagacttaggtgtggacgcagagctgttgacgctgattgaggcggctttcggcgaaatttcatcaatacatttgcccactaaaactaaatttaaattcggagccatgatgaaatctggaatgttcctcacactgtttgtgaacacagtcattaacattgtaatcgcaagcagagtgttgagagaacggctaaccggatcaccatgtgcagcattcattggagatgacaatatcgtgaaaggagtcaaatcggacaaattaatggcagacaggtgcgccacctggttgaatatggaagtcaagattatagatgctgtggtgggcgagaaagcgccttatttctgtggagggtttattttgtgtgactccgtgaccggcacagcgtgccgtgtggcagaccccctaaaaaggctgtttaagcttggcaaacctctggcagcagacgatgaacatgatgatgacaggagaagggcattgcatgaagagtcaacacgctggaaccgagtgggtattctttcagagctgtgcaaggcagtagaatcaaggtatgaaaccgtaggaacttccatcatagttatggccatgactactctagctagcagtgttaaatcattcagctacctgagaggggcccctataactctctacggctaacctgaatggactacgacgtatcacgcccaaacatttacagccgcggtgtcaaaaaccgcgtggacgtggttaacatccctgctgggaggatcagccgtaattattataattggcttggtgctggctactattgtggccatgtacgtgctgaccaaccagaaacataattgaatacagcagcaattggcaagctgcttacatagaactcgcggcgattggcatgccgccttaaaatttttattttattttttcttttcttttccgaatcggattttgtttttaatatttcaaaaaaaaaaaaaaaaaaaaaaaaaaaaaaaaaaaaaaaaaaaaaaaaaaaaaaaaaaaaaaaaaaaaaaaaaaaaaaaa

SEQ ID NO: 7 - DNA, 11446 bp, Venezuelan equine encephalitis virus
  source 1..11446: mol_type = other DNA
ataggcggcgcatgagagaagcccagaccaattacctacccaaaatggagaaagttcacgttgacatcgaggaagacagcccattcctcagagctttgcagcggagcttcccgcagtttgaggtagaagccaagcaggtcactgataatgaccatgctaatgccagagcgttttcgcatctggcttcaaaactgatcgaaacggaggtggacccatccgacacgatccttgacattggaagtgcgcccgcccgcagaatgtattctaagcacaagtatcattgtatctgtccgatgagatgtgcggaagatccggacagattgtataagtatgcaactaagctgaagaaaaactgtaaggaaataactgataaggaattggacaagaaaatgaaggagctcgccgccgtcatgagcgaccctgacctggaaactgagactatgtgcctccacgacgacgagtcgtgtcgctacgaagggcaagtcgctgtttaccaggatgtatacgcggttgacggaccgacaagtctctatcaccaagccaataagggagttagagtcgcctactggataggctttgacaccaccccttttatgtttaagaacttggctggagcatatccatcatactctaccaactgggccgacgaaaccgtgttaacggctcgtaacataggcctatgcagctctgacgttatggagcggtcacgtagagggatgtccattcttagaaagaagtatttgaaaccatccaacaatgttctattctctgttggctcgaccatctaccacgagaagagggacttactgaggagctggcacctgccgtctgtatttcacttacgtggcaagcaaaattacacatgtcggtgtgagactatagttagttgcgacgggtacgtcgttaaaagaatagctatcagtccaggcctgtatgggaagccttcaggctatgctgctacgatgcaccgcgagggattcttgtgctgcaaagtgacagacacattgaacggggagagggtctcttttcccgtgtgcacgtatgtgccagctacattgtgtgaccaaatgactggcatactggcaacagatgtcagtgcggacgacgcgcaaaaactgctggttgggctcaaccagcgtatagtcgtcaacggtcgcacccagagaaacaccaataccatgaaaaattaccttttgcccgtagtggcccaggcatttgctaggtgggcaaaggaatataaggaagatcaagaagatgaaaggccactaggactacgagatagacagttagtcatggggtgttgttgggcttttagaaggcacaagataacatctatttataagcgcccggatacccaaaccatcatcaaagtgaacagcgatttccactcattcgtgctgcccaggataggcagtaacacattggagatcgggctgagaacaagaatcaggaaaatgttagaggagcacaaggagccgtcacctctcattaccgccgaggacgtacaagaagctaagtgcgcagccgatgaggctaaggaggtgcgtgaagccgaggagttgcgcgcagctctaccacctttggcagctgatgttgaggagcccactctggaagccgatgtcgacttgatgttacaagaggctggggccggctcagtggagacacctcgtggcttgataaaggttaccagctacgatggcgaggacaagatcggctcttacgctgtgctttctccgcaggctgtactcaagagtgaaaaattatcttgcatccaccctctcgctgaacaagtcatagtgataacacactctggccgaaaagggcgttatgccgtggaaccataccatggtaaagtagtggtgccagagggacatgcaatacccgtccaggactttcaagctctgagtgaaagtgccaccattgtgtacaacgaacgtgagttcgtaaacaggtacctgcaccatattgccacacatggaggagcgctgaacactgatgaagaatattacaaaactgtcaagcccagcgagcacgacggcgaatacctgtacgacatcgacaggaaacagtgcgtcaagaaagaactagtcactgggctagggctcacaggcgagctggtggatcctcccttccatgaattcgcctacgagagtctgagaacacgaccagccgctccttaccaagtaccaaccataggggtgtatggcgtgccaggatcaggcaagtctggcatcattaaaagcgcagtcaccaaaaaagatctagtggtgagcgccaagaaagaaaactgtgcagaaattataagggacgtcaagaaaatgaaagggctggacgtcaatgccagaactgtggactcagtgctcttgaatggatgcaaacaccccgtagagaccctgtatattgacgaagcttttgcttgtcatgcaggtactctcagagcgctcatagccattataagacctaaaaaggcagtgctctgcggggatcccaaacagtgcggtttttttaacatgatgtgcctgaaagtgcattttaaccacgagatttgcacacaagtcttccacaaaagcatctctcgccgttgcactaaatctgtgacttcggtcgtctcaaccttgttttacgacaaaaaaatgagaacgacgaatccgaaagagactaagattgtgattgacactaccggcagtaccaaacctaagcaggacgatctcattctcacttgtttcagagggtgggtgaagcagttgcaaatagattacaaaggcaacgaaataatgacggcagctgcctctcaagggctgacccgtaaaggtgtgtatgccgttcggtacaaggtgaatgaaaatcctctgtacgcacccacctcagaacatgtgaacgtcctactgacccgcacggaggaccgcatcgtgtggaaaacactagccggcgacccatggataaaaacactgactgccaagtaccctgggaatttcactgccacgatagaggagtggcaagcagagcatgatgccatcatgaggcacatcttggagagaccggaccctaccgacgtcttccagaataaggcaaacgtgtgttgggccaaggctttagtgccggtgctgaagaccgctggcatagacatgaccactgaacaatggaacactgtggattattttgaaacggacaaagctcactcagcagagatagtattgaaccaactatgcgtgaggttctttggactcgatctggactccggtctattttctgcacccactgttccgttatccattaggaataatcactgggataactccccgtcgcctaacatgtacgggctgaataaagaagtggtccgtcagctctctcgcaggtacccacaactgcctcgggcagttgccactggaagagtctatgacatgaacactggtacactgcgcaattatgatccgcgcataaacctagtacctgtaaacagaagactgcctcatgctttagtcctccaccataatgaacacccacagagtgacttttcttcattcgtcagcaaattgaagggcagaactgtcctggtggtcggggaaaagttgtccgtcccaggcaaaatggttgactggttgtcagaccggcctgaggctaccttcagagctcggctggatttaggcatcccaggtgatgtgcccaaatatgacataatatttgttaatgtgaggaccccatataaataccatcactatcagcagtgtgaagaccatgccattaagcttagcatgttgaccaagaaagcttgtctgcatctgaatcccggcggaacctgtgtcagcataggttatggttacgctgacagggccagcgaaagcatcattggtgctatagcgcggcagttcaagttttcccgggtatgcaaaccgaaatcctcacttgaagagacggaagttctgtttgtattcattgggtacgatcgcaaggcccgtacgcacaatccttacaagctttcatcaaccttgaccaacatttatacaggttccagactccacgaagccggatgtgcaccctcatatcatgtggtgcgaggggatattgccacggccaccgaaggagtgattataaatgctgctaacagcaaaggacaacctggcggaggggtgtgcggagcgctgtataagaaattcccggaaagcttcgatttacagccgatcgaagtaggaaaagcgcgactggtcaaaggtgcagctaaacatatcattcatgccgtaggaccaaacttcaacaaagtttcggaggttgaaggtgacaaacagttggcagaggcttatgagtccatcgctaagattgtcaacgataacaattacaagtcagtagcgattccactgttgtccaccggcatcttttccgggaacaaagatcgactaacccaatcattgaaccatttgctgacagctttagacaccactgatgcagatgtagccatatactgcagggacaagaaatgggaaatgactctcaaggaagcagtggctaggagagaagcagtggaggagatatgcatatccgacgactcttcagtgacagaacctgatgcagagctggtgagggtgcatccgaagagttctttggctggaaggaagggctacagcacaagcgatggcaaaactttctcatatttggaagggaccaagtttcaccaggcggccaaggatatagcagaaattaatgccatgtggcccgttgcaacggaggccaatgagcaggtatgcatgtatatcctcggagaaagcatgagcagtattaggtcgaaatgccccgtcgaagagtcggaagcctccacaccacctagcacgctgccttgcttgtgcatccatgccatgactccagaaagagtacagcgcctaaaagcctcacgtccagaacaaattactgtgtgctcatcctttccattgccgaagtatagaatcactggtgtgcagaagatccaatgctcccagcctatattgttctcaccgaaagtgcctgcgtatattcatccaaggaagtatctcgtggaaacaccaccggtagacgagactccggagccatcggcagagaaccaatccacagaggggacacctgaacaaccaccacttataaccgaggatgagaccaggactagaacgcctgagccgatcatcatcgaagaggaagaagaggatagcataagtttgctgtcagatggcccgacccaccaggtgctgcaagtcgaggcagacattcacgggccgccctctgtatctagctcatcctggtccattcctcatgcatccgactttgatgtggacagtttatccatacttgacaccctggagggagctagcgtgaccagcggggcaacgtcagccgagactaactcttacttcgcaaagagtatggagtttctggcgcgaccggtgcctgcgcctcgaacagtattcaggaaccctccacatcccgctccgcgcacaagaacaccgtcacttgcacccagcagggcctgctcgagaaccagcctagtttccaccccgccaggcgtgaatagggtgatcactagagaggagctcgaggcgcttaccccgtcacgcactcctagcaggtcggtctcgagaaccagcctggtctccaacccgccaggcgtaaatagggtgattacaagagaggagtttgaggcgttcgtagcacaacaacaatgacggtttgatgcgggtgcatacatcttttcctccgacaccggtcaagggcatttacaacaaaaatcagtaaggcaaacggtgctatccgaagtggtgttggagaggaccgaattggagatttcgtatgccccgcgcctcgaccaagaaaaagaagaattactacgcaagaaattacagttaaatcccacacctgctaacagaagcagataccagtccaggaaggtggagaacatgaaagccataacagctagacgtattctgcaaggcctagggcattatttgaaggcagaaggaaaagtggagtgctaccgaaccctgcatcctgttcctttgtattcatctagtgtgaaccgtgccttttcaagccccaaggtcgcagtggaagcctgtaacgccatgttgaaagagaactttccgactgtggcttcttactgtattattccagagtacgatgcctatttggacatggttgacggagcttcatgctgcttagacactgccagtttttgccctgcaaagctgcgcagctttccaaagaaacactcctatttggaacccacaatacgatcggcagtgccttcagcgatccagaacacgctccagaacgtcctggcagctgccacaaaaagaaattgcaatgtcacgcaaatgagagaattgcccgtattggattcggcggcctttaatgtggaatgcttcaagaaatatgcgtgtaataatgaatattgggaaacgtttaaagaaaaccccatcaggcttactgaagaaaacgtggtaaattacattaccaaattaaaaggaccaaaagctgctgctctttttgcgaagacacataatttgaatatgttgcaggacataccaatggacaggtttgtaatggacttaaagagagacgtgaaagtgactccaggaacaaaacatactgaagaacggcccaaggtacaggtgatccaggctgccgatccgctagcaacagcgtatctgtgcggaatccaccgagagctggttaggagattaaatgcggtcctgcttccgaacattcatacactgtttgatatgtcggctgaagactttgacgctattatagccgagcacttccagcctggggattgtgttctggaaactgacatcgcgtcgtttgataaaagtgaggacgacgccatggctctgaccgcgttaatgattctggaagacttaggtgtggacgcagagctgttgacgctgattgaggcggctttcggcgaaatttcatcaatacatttgcccactaaaactaaatttaaattcggagccatgatgaaatctggaatgttcctcacactgtttgtgaacacagtcattaacattgtaatcgcaagcagagtgttgagagaacggctaaccggatcaccatgtgcagcattcattggagatgacaatatcgtgaaaggagtcaaatcggacaaattaatggcagacaggtgcgccacctggttgaatatggaagtcaagattatagatgctgtggtgggcgagaaagcgccttatttctgtggagggtttattttgtgtgactccgtgaccggcacagcgtgccgtgtggcagaccccctaaaaaggctgtttaagcttggcaaacctctggcagcagacgatgaacatgatgatgacaggagaagggcattgcatgaagagtcaacacgctggaaccgagtgggtattctttcagagctgtgcaaggcagtagaatcaaggtatgaaaccgtaggaacttccatcatagttatggccatgactactctagctagcagtgttaaatcattcagctacctgagaggggcccctataactctctacggctaacctgaatggactacgacatagtctagtccgccaagatgttcccgttccagccaatgtatccgatgcagccaatgccctatcgcaacccgttcgcggccccgcgcaggccctggttccccagaaccgacccttttctggcgatgcaggtgcaggaattaacccgctcgatggctaacctgacgttcaagcaacgccgggacgcgccacctgaggggccatccgctaagaaaccgaagaaggaggcctcgcaaaaacagaaagggggaggccaagggaagaagaagaagaaccaagggaagaagaaggctaagacagggccgcctaatccgaaggcacagaatggaaacaagaagaagaccaacaagaaaccaggcaagagacagcgcatggtcatgaaattggaatctgacaagacgttcccaatcatgttggaagggaagataaacggctacgcttgtgtggtcggagggaagttattcaggccgatgcatgtggaaggcaagatcgacaacgacgttctggccgcgcttaagacgaagaaagcatccaaatacgatcttgagtatgcagatgtgccacagaacatgcgggccgatacattcaaatacacccatgagaaaccccaaggctattacagctggcatcatggagcagtccaatatgaaaatgggcgtttcacggtgccgaaaggagttggggccaagggagacagcggacgacccattctggataaccagggacgggtggtcgctattgtgctgggaggtgtgaatgaaggatctaggacagccctttcagtcgtcatgtggaacgagaagggagttaccgtgaagtatactccggagaactgcgagcaatggtcactagtgaccaccatgtgtctgctcgccaatgtgacgttcccatgtgctcaaccaccaatttgctacgacagaaaaccagcagagactttggccatgctcagcgttaacgttgacaacccgggctacgatgagctgctggaagcagctgttaagtgccccggaaggaaaaggagatccaccgaggagctgtttaatgagtataagctaacgcgcccttacatggccagatgcatcagatgtgcagttgggagctgccatagtccaatagcaatcgaggcagtaaagagcgacgggcacgacggttatgttagacttcagacttcctcgcagtatggcctggattcctccggcaacttaaagggcaggaccatgcggtatgacatgcacgggaccattaaagagataccactacatcaagtgtcactctatacatctcgcccgtgtcacattgtggatgggcacggttatttcctgcttgccaggtgcccggcaggggactccatcaccatggaatttaagaaagattccgtcagacactcctgctcggtgccgtatgaagtgaaatttaatcctgtaggcagagaactctatactcatcccccagaacacggagtagagcaagcgtgccaagtctacgcacatgatgcacagaacagaggagcttatgtcgagatgcacctcccgggctcagaagtggacagcagtttggtttccttgagcggcagttcagtcaccgtgacacctcctgatgggactagcgccctggtggaatgcgagtgtggcggcacaaagatctccgagaccatcaacaagacaaaacagttcagccagtgcacaaagaaggagcagtgcagagcatatcggctgcagaacgataagtgggtgtataattctgacaaactgcccaaagcagcgggagccaccttaaaaggaaaactgcatgtcccattcttgctggcagacggcaaatgcaccgtgcctctagcaccagaacctatgataaccttcggtttcagatcagtgtcactgaaactgcaccctaagaatcccacatatctaatcacccgccaacttgctgatgagcctcactacacgcacgagctcatatctgaaccagctgttaggaattttaccgtcaccgaaaaagggtgggagtttgtatggggaaaccacccgccgaaaaggttttgggcacaggaaacagcacccggaaatccacatgggctaccgcacgaggtgataactcattattaccacagataccctatgtccaccatcctgggtttgtcaatttgtgccgccattgcaaccgtttccgttgcagcgtctacctggctgttttgcagatctagagttgcgtgcctaactccttaccggctaacacctaacgctaggataccattttgtctggctgtgctttgctgcgcccgcactgcccgggccgagaccacctgggagtccttggatcacctatggaacaataaccaacagatgttctggattcaattgctgatccctctggccgccttgatcgtagtgactcgcctgctcaggtgcgtgtgctgtgtcgtgccttttttagtcatggccggcgccgcaggcgccggcgcctacgagcacgcgaccacgatgccgagccaagcgggaatctcgtataacactatagtcaacagagcaggctacgcaccactccctatcagcataacaccaacaaagatcaagctgatacctacagtgaacttggagtacgtcacctgccactacaaaacaggaatggattcaccagccatcaaatgctgcggatctcaggaatgcactccaacttacaggcctgatgaacagtgcaaagtcttcacaggggtttacccgttcatgtggggtggtgcatattgcttttgcgacactgagaacacccaagtcagcaaggcctacgtaatgaaatctgacgactgccttgcggatcatgctgaagcatataaagcgcacacagcctcagtgcaggcgttcctcaacatcacagtgggagaacactctattgtgactaccgtgtatgtgaatggagaaactcctgtgaatttcaatggggtcaaaataactgcaggtccgctttccacagcttggacaccctttgatcgcaaaatcgtgcagtatgccggggagatctataattatgattttcctgagtatggggcaggacaaccaggagcatttggagatatacaatccagaacagtctcaagctctgatctgtatgccaataccaacctagtgctgcagagacccaaagcaggagcgatccacgtgccatacactcaggcaccttcgggttttgagcaatggaagaaagataaagctccatcattgaaatttaccgcccctttcggatgcgaaatatatacaaaccccattcgcgccgaaaactgtgctgtagggtcaattccattagcctttgacattcccgacgccttgttcaccagggtgtcagaaacaccgacactttcagcggccgaatgcactcttaacgagtgcgtgtattcttccgactttggtgggatcgccacggtcaagtactcggccagcaagtcaggcaagtgcgcagtccatgtgccatcagggactgctaccctaaaagaagcagcagtcgagctaaccgagcaagggtcggcgactatccatttctcgaccgcaaatatccacccggagttcaggctccaaatatgcacatcatatgttacgtgcaaaggtgattgtcaccccccgaaagaccatattgtgacacaccctcagtatcacgcccaaacatttacagccgcggtgtcaaaaaccgcgtggacgtggttaacatccctgctgggaggatcagccgtaattattataattggcttggtgctggctactattgtggccatgtacgtgctgaccaaccagaaacataattgaatacagcagcaattggcaagctgcttacatagaactcgcggcgattggcatgccgccttaaaatttttattttatttttcttttcttttccgaatcggattttgtttttaatatttc

SEQ ID NO: 8 - DNA, 7914 bp, Venezuelan equine encephalitis virus
  source 1..7914: mol_type = other DNA
taatacgactcactataggatgggcggcgcatgagagaagcccagaccaattacctacccaaaatggagaaagttcacgttgacatcgaggaagacagcccattcctcagagctttgcagcggagcttcccgcagtttgaggtagaagccaagcaggtcactgataatgaccatgctaatgccagagcgttttcgcatctggcttcaaaactgatcgaaacggaggtggacccatccgacacgatccttgacattggaagtgcgcccgcccgcagaatgtattctaagcacaagtatcattgtatctgtccgatgagatgtgcggaagatccggacagattgtataagtatgcaactaagctgaagaaaaactgtaaggaaataactgataaggaattggacaagaaaatgaaggagctcgccgccgtcatgagcgaccctgacctggaaactgagactatgtgcctccacgacgacgagtcgtgtcgctacgaagggcaagtcgctgtttaccaggatgtatacgcggttgacggaccgacaagtctctatcaccaagccaataagggagttagagtcgcctactggataggctttgacaccaccccttttatgtttaagaacttggctggagcatatccatcatactctaccaactgggccgacgaaaccgtgttaacggctcgtaacataggcctatgcagctctgacgttatggagcggtcacgtagagggatgtccattcttagaaagaagtatttgaaaccatccaacaatgttctattctctgttggctcgaccatctaccacgagaagagggacttactgaggagctggcacctgccgtctgtatttcacttacgtggcaagcaaaattacacatgtcggtgtgagactatagttagttgcgacgggtacgtcgttaaaagaatagctatcagtccaggcctgtatgggaagccttcaggctatgctgctacgatgcaccgcgagggattcttgtgctgcaaagtgacagacacattgaacggggagagggtctcttttcccgtgtgcacgtatgtgccagctacattgtgtgaccaaatgactggcatactggcaacagatgtcagtgcggacgacgcgcaaaaactgctggttgggctcaaccagcgtatagtcgtcaacggtcgcacccagagaaacaccaataccatgaaaaattaccttttgcccgtagtggcccaggcatttgctaggtgggcaaaggaatataaggaagatcaagaagatgaaaggccactaggactacgagatagacagttagtcatggggtgttgttgggcttttagaaggcacaagataacatctatttataagcgcccggatacccaaaccatcatcaaagtgaacagcgatttccactcattcgtgctgcccaggataggcagtaacacattggagatcgggctgagaacaagaatcaggaaaatgttagaggagcacaaggagccgtcacctctcattaccgccgaggacgtacaagaagctaagtgcgcagccgatgaggctaaggaggtgcgtgaagccgaggagttgcgcgcagctctaccacctttggcagctgatgttgaggagcccactctggaagccgatgtcgacttgatgttacaagaggctggggccggctcagtggagacacctcgtggcttgataaaggttaccagctacgctggcgaggacaagatcggctcttacgctgtgctttctccgcaggctgtactcaagagtgaaaaattatcttgcatccaccctctcgctgaacaagtcatagtgataacacactctggccgaaaagggcgttatgccgtggaaccataccatggtaaagtagtggtgccagagggacatgcaatacccgtccaggactttcaagctctgagtgaaagtgccaccattgtgtacaacgaacgtgagttcgtaaacaggtacctgcaccatattgccacacatggaggagcgctgaacactgatgaagaatattacaaaactgtcaagcccagcgagcacgacggcgaatacctgtacgacatcgacaggaaacagtgcgtcaagaaagaactagtcactgggctagggctcacaggcgagctggtggatcctcccttccatgaattcgcctacgagagtctgagaacacgaccagccgctccttaccaagtaccaaccataggggtgtatggcgtgccaggatcaggcaagtctggcatcattaaaagcgcagtcaccaaaaaagatctagtggtgagcgccaagaaagaaaactgtgcagaaattataagggacgtcaagaaaatgaaagggctggacgtcaatgccagaactgtggactcagtgctcttgaatggatgcaaacaccccgtagagaccctgtatattgacgaagcttttgcttgtcatgcaggtactctcagagcgctcatagccattataagacctaaaaaggcagtgctctgcggggatcccaaacagtgcggtttttttaacatgatgtgcctgaaagtgcattttaaccacgagatttgcacacaagtcttccacaaaagcatctctcgccgttgcactaaatctgtgacttcggtcgtctcaaccttgttttacgacaaaaaaatgagaacgacgaatccgaaagagactaagattgtgattgacactaccggcagtaccaaacctaagcaggacgatctcattctcacttgtttcagagggtgggtgaagcagttgcaaatagattacaaaggcaacgaaataatgacggcagctgcctctcaagggctgacccgtaaaggtgtgtatgccgttcggtacaaggtgaatgaaaatcctctgtacgcacccacctcagaacatgtgaacgtcctactgacccgcacggaggaccgcatcgtgtggaaaacactagccggcgacccatggataaaaacactgactgccaagtaccctgggaatttcactgccacgatagaggagtggcaagcagagcatgatgccatcatgaggcacatcttggagagaccggaccctaccgacgtcttccagaataaggcaaacgtgtgttgggccaaggctttagtgccggtgctgaagaccgctggcatagacatgaccactgaacaatggaacactgtggattattttgaaacggacaaagctcactcagcagagatagtattgaaccaactatgcgtgaggttctttggactcgatctggactccggtctattttctgcacccactgttccgttatccattaggaataatcactgggataactccccgtcgcctaacatgtacgggctgaataaagaagtggtccgtcagctctctcgcaggtacccacaactgcctcgggcagttgccactggaagagtctatgacatgaacactggtacactgcgcaattatgatccgcgcataaacctagtacctgtaaacagaagactgcctcatgctttagtcctccaccataatgaacacccacagagtgacttttcttcattcgtcagcaaattgaagggcagaactgtcctggtggtcggggaaaagttgtccgtcccaggcaaaatggttgactggttgtcagaccggcctgaggctaccttcagagctcggctggatttaggcatcccaggtgatgtgcccaaatatgacataatatttgttaatgtgaggaccccatataaataccatcactatcagcagtgtgaagaccatgccattaagcttagcatgttgaccaagaaagcttgtctgcatctgaatcccggcggaacctgtgtcagcataggttatggttacgctgacagggccagcgaaagcatcattggtgctatagcgcggcagttcaagttttcccgggtatgcaaaccgaaatcctcacttgaagagacggaagttctgtttgtattcattgggtacgatcgcaaggcccgtacgcacaatccttacaagctttcatcaaccttgaccaacatttatacaggttccagactccacgaagccggatgtgcaccctcatatcatgtggtgcgaggggatattgccacggccaccgaaggagtgattataaatgctgctaacagcaaaggacaacctggcggaggggtgtgcggagcgctgtataagaaattcccggaaagcttcgatttacagccgatcgaagtaggaaaagcgcgactggtcaaaggtgcagctaaacatatcattcatgccgtaggaccaaacttcaacaaagtttcggaggttgaaggtgacaaacagttggcagaggcttatgagtccatcgctaagattgtcaacgataacaattacaagtcagtagcgattccactgttgtccaccggcatcttttccgggaacaaagatcgactaacccaatcattgaaccatttgctgacagctttagacaccactgatgcagatgtagccatatactgcagggacaagaaatgggaaatgactctcaaggaagcagtggctaggagagaagcagtggaggagatatgcatatccgacgactcttcagtgacagaacctgatgcagagctggtgagggtgcatccgaagagttctttggctggaaggaagggctacagcacaagcgatggcaaaactttctcatatttggaagggaccaagtttcaccaggcggccaaggatatagcagaaattaatgccatgtggcccgttgcaacggaggccaatgagcaggtatgcatgtatatcctcggagaaagcatgagcagtattaggtcgaaatgccccgtcgaagagtcggaagcctccacaccacctagcacgctgccttgcttgtgcatccatgccatgactccagaaagagtacagcgcctaaaagcctcacgtccagaacaaattactgtgtgctcatcctttccattgccgaagtatagaatcactggtgtgcagaagatccaatgctcccagcctatattgttctcaccgaaagtgcctgcgtatattcatccaaggaagtatctcgtggaaacaccaccggtagacgagactccggagccatcggcagagaaccaatccacagaggggacacctgaacaaccaccacttataaccgaggatgagaccaggactagaacgcctgagccgatcatcatcgaagaggaagaagaggatagcataagtttgctgtcagatggcccgacccaccaggtgctgcaagtcgaggcagacattcacgggccgccctctgtatctagctcatcctggtccattcctcatgcatccgactttgatgtggacagtttatccatacttgacaccctggagggagctagcgtgaccagcggggcaacgtcagccgagactaactcttacttcgcaaagagtatggagtttctggcgcgaccggtgcctgcgcctcgaacagtattcaggaaccctccacatcccgctccgcgcacaagaacaccgtcacttgcacccagcagggcctgctcgagaaccagcctagtttccaccccgccaggcgtgaatagggtgatcactagagaggagctcgaggcgcttaccccgtcacgcactcctagcaggtcggtctcgagaaccagcctggtctccaacccgccaggcgtaaatagggtgattacaagagaggagtttgaggcgttcgtagcacaacaacaatgacggtttgatgcgggtgcatacatcttttcctccgacaccggtcaagggcatttacaacaaaaatcagtaaggcaaacggtgctatccgaagtggtgttggagaggaccgaattggagatttcgtatgccccgcgcctcgaccaagaaaaagaagaattactacgcaagaaattacagttaaatcccacacctgctaacagaagcagataccagtccaggaaggtggagaacatgaaagccataacagctagacgtattctgcaaggcctagggcattatttgaaggcagaaggaaaagtggagtgctaccgaaccctgcatcctgttcctttgtattcatctagtgtgaaccgtgccttttcaagccccaaggtcgcagtggaagcctgtaacgccatgttgaaagagaactttccgactgtggcttcttactgtattattccagagtacgatgcctatttggacatggttgacggagcttcatgctgcttagacactgccagtttttgccctgcaaagctgcgcagctttccaaagaaacactcctatttggaacccacaatacgatcggcagtgccttcagcgatccagaacacgctccagaacgtcctggcagctgccacaaaaagaaattgcaatgtcacgcaaatgagagaattgcccgtattggattcggcggcctttaatgtggaatgcttcaagaaatatgcgtgtaataatgaatattgggaaacgtttaaagaaaaccccatcaggcttactgaagaaaacgtggtaaattacattaccaaattaaaaggaccaaaagctgctgctctttttgcgaagacacataatttgaatatgttgcaggacataccaatggacaggtttgtaatggacttaaagagagacgtgaaagtgactccaggaacaaaacatactgaagaacggcccaaggtacaggtgatccaggctgccgatccgctagcaacagcgtatctgtgcggaatccaccgagagctggttaggagattaaatgcggtcctgcttccgaacattcatacactgtttgatatgtcggctgaagactttgacgctattatagccgagcacttccagcctggggattgtgttctggaaactgacatcgcgtcgtttgataaaagtgaggacgacgccatggctctgaccgcgttaatgattctggaagacttaggtgtggacgcagagctgttgacgctgattgaggcggctttcggcgaaatttcatcaatacatttgcccactaaaactaaatttaaattcggagccatgatgaaatctggaatgttcctcacactgtttgtgaacacagtcattaacattgtaatcgcaagcagagtgttgagagaacggctaaccggatcaccatgtgcagcattcattggagatgacaatatcgtgaaaggagtcaaatcggacaaattaatggcagacaggtgcgccacctggttgaatatggaagtcaagattatagatgctgtggtgggcgagaaagcgccttatttctgtggagggtttattttgtgtgactccgtgaccggcacagcgtgccgtgtggcagaccccctaaaaaggctgtttaagcttggcaaacctctggcagcagacgatgaacatgatgatgacaggagaagggcattgcatgaagagtcaacacgctggaaccgagtgggtattctttcagagctgtgcaaggcagtagaatcaaggtatgaaaccgtaggaacttccatcatagttatggccatgactactctagctagcagtgttaaatcattcagctacctgagaggggcccctataactctctacggctaacctgaatggactacgacgtatcacgcccaaacatttacagccgcggtgtcaaaaaccgcgtggacgtggttaacatccctgctgggaggatcagccgtaattattataattggcttggtgctggctactattgtggccatgtacgtgctgaccaaccagaaacataattgaatacagcagcaattggcaagctgcttacatagaactcgcggcgattggcatgccgccttaaaatttttattttattttttcttttcttttccgaatcggattttgtttttaatatttcaaaaaaaaaaaaaaaaaaaaaaaaaaaaaaaaaaaaaaaaaaaaaaaaaaaaaaaaaaaaaaaaaaaaaaaaaaaaaaaa

SEQ ID NO: 9 - DNA, 7894 bp, Venezuelan equine encephalitis virus
  source 1..7894: mol_type = other DNA
ataggcggcgcatgagagaagcccagaccaattacctacccaaaatggagaaagttcacgttgacatcgaggaagacagcccattcctcagagctttgcagcggagcttcccgcagtttgaggtagaagccaagcaggtcactgataatgaccatgctaatgccagagcgttttcgcatctggcttcaaaactgatcgaaacggaggtggacccatccgacacgatccttgacattggaagtgcgcccgcccgcagaatgtattctaagcacaagtatcattgtatctgtccgatgagatgtgcggaagatccggacagattgtataagtatgcaactaagctgaagaaaaactgtaaggaaataactgataaggaattggacaagaaaatgaaggagctcgccgccgtcatgagcgaccctgacctggaaactgagactatgtgcctccacgacgacgagtcgtgtcgctacgaagggcaagtcgctgtttaccaggatgtatacgcggttgacggaccgacaagtctctatcaccaagccaataagggagttagagtcgcctactggataggctttgacaccaccccttttatgtttaagaacttggctggagcatatccatcatactctaccaactgggccgacgaaaccgtgttaacggctcgtaacataggcctatgcagctctgacgttatggagcggtcacgtagagggatgtccattcttagaaagaagtatttgaaaccatccaacaatgttctattctctgttggctcgaccatctaccacgagaagagggacttactgaggagctggcacctgccgtctgtatttcacttacgtggcaagcaaaattacacatgtcggtgtgagactatagttagttgcgacgggtacgtcgttaaaagaatagctatcagtccaggcctgtatgggaagccttcaggctatgctgctacgatgcaccgcgagggattcttgtgctgcaaagtgacagacacattgaacggggagagggtctcttttcccgtgtgcacgtatgtgccagctacattgtgtgaccaaatgactggcatactggcaacagatgtcagtgcggacgacgcgcaaaaactgctggttgggctcaaccagcgtatagtcgtcaacggtcgcacccagagaaacaccaataccatgaaaaattaccttttgcccgtagtggcccaggcatttgctaggtgggcaaaggaatataaggaagatcaagaagatgaaaggccactaggactacgagatagacagttagtcatggggtgttgttgggcttttagaaggcacaagataacatctatttataagcgcccggatacccaaaccatcatcaaagtgaacagcgatttccactcattcgtgctgcccaggataggcagtaacacattggagatcgggctgagaacaagaatcaggaaaatgttagaggagcacaaggagccgtcacctctcattaccgccgaggacgtacaagaagctaagtgcgcagccgatgaggctaaggaggtgcgtgaagccgaggagttgcgcgcagctctaccacctttggcagctgatgttgaggagcccactctggaagccgatgtcgacttgatgttacaagaggctggggccggctcagtggagacacctcgtggcttgataaaggttaccagctacgatggcgaggacaagatcggctcttacgctgtgctttctccgcaggctgtactcaagagtgaaaaattatcttgcatccaccctctcgctgaacaagtcatagtgataacacactctggccgaaaagggcgttatgccgtggaaccataccatggtaaagtagtggtgccagagggacatgcaatacccgtccaggactttcaagctctgagtgaaagtgccaccattgtgtacaacgaacgtgagttcgtaaacaggtacctgcaccatattgccacacatggaggagcgctgaacactgatgaagaatattacaaaactgtcaagcccagcgagcacgacggcgaatacctgtacgacatcgacaggaaacagtgcgtcaagaaagaactagtcactgggctagggctcacaggcgagctggtggatcctcccttccatgaattcgcctacgagagtctgagaacacgaccagccgctccttaccaagtaccaaccataggggtgtatggcgtgccaggatcaggcaagtctggcatcattaaaagcgcagtcaccaaaaaagatctagtggtgagcgccaagaaagaaaactgtgcagaaattataagggacgtcaagaaaatgaaagggctggacgtcaatgccagaactgtggactcagtgctcttgaatggatgcaaacaccccgtagagaccctgtatattgacgaagcttttgcttgtcatgcaggtactctcagagcgctcatagccattataagacctaaaaaggcagtgctctgcggggatcccaaacagtgcggtttttttaacatgatgtgcctgaaagtgcattttaaccacgagatttgcacacaagtcttccacaaaagcatctctcgccgttgcactaaatctgtgacttcggtcgtctcaaccttgttttacgacaaaaaaatgagaacgacgaatccgaaagagactaagattgtgattgacactaccggcagtaccaaacctaagcaggacgatctcattctcacttgtttcagagggtgggtgaagcagttgcaaatagattacaaaggcaacgaaataatgacggcagctgcctctcaagggctgacccgtaaaggtgtgtatgccgttcggtacaaggtgaatgaaaatcctctgtacgcacccacctcagaacatgtgaacgtcctactgacccgcacggaggaccgcatcgtgtggaaaacactagccggcgacccatggataaaaacactgactgccaagtaccctgggaatttcactgccacgatagaggagtggcaagcagagcatgatgccatcatgaggcacatcttggagagaccggaccctaccgacgtcttccagaataaggcaaacgtgtgttgggccaaggctttagtgccggtgctgaagaccgctggcatagacatgaccactgaacaatggaacactgtggattattttgaaacggacaaagctcactcagcagagatagtattgaaccaactatgcgtgaggttctttggactcgatctggactccggtctattttctgcacccactgttccgttatccattaggaataatcactgggataactccccgtcgcctaacatgtacgggctgaataaagaagtggtccgtcagctctctcgcaggtacccacaactgcctcgggcagttgccactggaagagtctatgacatgaacactggtacactgcgcaattatgatccgcgcataaacctagtacctgtaaacagaagactgcctcatgctttagtcctccaccataatgaacacccacagagtgacttttcttcattcgtcagcaaattgaagggcagaactgtcctggtggtcggggaaaagttgtccgtcccaggcaaaatggttgactggttgtcagaccggcctgaggctaccttcagagctcggctggatttaggcatcccaggtgatgtgcccaaatatgacataatatttgttaatgtgaggaccccatataaataccatcactatcagcagtgtgaagaccatgccattaagcttagcatgttgaccaagaaagcttgtctgcatctgaatcccggcggaacctgtgtcagcataggttatggttacgctgacagggccagcgaaagcatcattggtgctatagcgcggcagttcaagttttcccgggtatgcaaaccgaaatcctcacttgaagagacggaagttctgtttgtattcattgggtacgatcgcaaggcccgtacgcacaatccttacaagctttcatcaaccttgaccaacatttatacaggttccagactccacgaagccggatgtgcaccctcatatcatgtggtgcgaggggatattgccacggccaccgaaggagtgattataaatgctgctaacagcaaaggacaacctggcggaggggtgtgcggagcgctgtataagaaattcccggaaagcttcgatttacagccgatcgaagtaggaaaagcgcgactggtcaaaggtgcagctaaacatatcattcatgccgtaggaccaaacttcaacaaagtttcggaggttgaaggtgacaaacagttggcagaggcttatgagtccatcgctaagattgtcaacgataacaattacaagtcagtagcgattccactgttgtccaccggcatcttttccgggaacaaagatcgactaacccaatcattgaaccatttgctgacagctttagacaccactgatgcagatgtagccatatactgcagggacaagaaatgggaaatgactctcaaggaagcagtggctaggagagaagcagtggaggagatatgcatatccgacgactcttcagtgacagaacctgatgcagagctggtgagggtgcatccgaagagttctttggctggaaggaagggctacagcacaagcgatggcaaaactttctcatatttggaagggaccaagtttcaccaggcggccaaggatatagcagaaattaatgccatgtggcccgttgcaacggaggccaatgagcaggtatgcatgtatatcctcggagaaagcatgagcagtattaggtcgaaatgccccgtcgaagagtcggaagcctccacaccacctagcacgctgccttgcttgtgcatccatgccatgactccagaaagagtacagcgcctaaaagcctcacgtccagaacaaattactgtgtgctcatcctttccattgccgaagtatagaatcactggtgtgcagaagatccaatgctcccagcctatattgttctcaccgaaagtgcctgcgtatattcatccaaggaagtatctcgtggaaacaccaccggtagacgagactccggagccatcggcagagaaccaatccacagaggggacacctgaacaaccaccacttataaccgaggatgagaccaggactagaacgcctgagccgatcatcatcgaagaggaagaagaggatagcataagtttgctgtcagatggcccgacccaccaggtgctgcaagtcgaggcagacattcacgggccgccctctgtatctagctcatcctggtccattcctcatgcatccgactttgatgtggacagtttatccatacttgacaccctggagggagctagcgtgaccagcggggcaacgtcagccgagactaactcttacttcgcaaagagtatggagtttctggcgcgaccggtgcctgcgcctcgaacagtattcaggaaccctccacatcccgctccgcgcacaagaacaccgtcacttgcacccagcagggcctgctcgagaaccagcctagtttccaccccgccaggcgtgaatagggtgatcactagagaggagctcgaggcgcttaccccgtcacgcactcctagcaggtcggtctcgagaaccagcctggtctccaacccgccaggcgtaaatagggtgattacaagagaggagtttgaggcgttcgtagcacaacaacaatgacggtttgatgcgggtgcatacatcttttcctccgacaccggtcaagggcatttacaacaaaaatcagtaaggcaaacggtgctatccgaagtggtgttggagaggaccgaattggagatttcgtatgccccgcgcctcgaccaagaaaaagaagaattactacgcaagaaattacagttaaatcccacacctgctaacagaagcagataccagtccaggaaggtggagaacatgaaagccataacagctagacgtattctgcaaggcctagggcattatttgaaggcagaaggaaaagtggagtgctaccgaaccctgcatcctgttcctttgtattcatctagtgtgaaccgtgccttttcaagccccaaggtcgcagtggaagcctgtaacgccatgttgaaagagaactttccgactgtggcttcttactgtattattccagagtacgatgcctatttggacatggttgacggagcttcatgctgcttagacactgccagtttttgccctgcaaagctgcgcagctttccaaagaaacactcctatttggaacccacaatacgatcggcagtgccttcagcgatccagaacacgctccagaacgtcctggcagctgccacaaaaagaaattgcaatgtcacgcaaatgagagaattgcccgtattggattcggcggcctttaatgtggaatgcttcaagaaatatgcgtgtaataatgaatattgggaaacgtttaaagaaaaccccatcaggcttactgaagaaaacgtggtaaattacattaccaaattaaaaggaccaaaagctgctgctctttttgcgaagacacataatttgaatatgttgcaggacataccaatggacaggtttgtaatggacttaaagagagacgtgaaagtgactccaggaacaaaacatactgaagaacggcccaaggtacaggtgatccaggctgccgatccgctagcaacagcgtatctgtgcggaatccaccgagagctggttaggagattaaatgcggtcctgcttccgaacattcatacactgtttgatatgtcggctgaagactttgacgctattatagccgagcacttccagcctggggattgtgttctggaaactgacatcgcgtcgtttgataaaagtgaggacgacgccatggctctgaccgcgttaatgattctggaagacttaggtgtggacgcagagctgttgacgctgattgaggcggctttcggcgaaatttcatcaatacatttgcccactaaaactaaatttaaattcggagccatgatgaaatctggaatgttcctcacactgtttgtgaacacagtcattaacattgtaatcgcaagcagagtgttgagagaacggctaaccggatcaccatgtgcagcattcattggagatgacaatatcgtgaaaggagtcaaatcggacaaattaatggcagacaggtgcgccacctggttgaatatggaagtcaagattatagatgctgtggtgggcgagaaagcgccttatttctgtggagggtttattttgtgtgactccgtgaccggcacagcgtgccgtgtggcagaccccctaaaaaggctgtttaagcttggcaaacctctggcagcagacgatgaacatgatgatgacaggagaagggcattgcatgaagagtcaacacgctggaaccgagtgggtattctttcagagctgtgcaaggcagtagaatcaaggtatgaaaccgtaggaacttccatcatagttatggccatgactactctagctagcagtgttaaatcattcagctacctgagaggggcccctataactctctacggctaacctgaatggactacgacgtatcacgcccaaacatttacagccgcggtgtcaaaaaccgcgtggacgtggttaacatccctgctgggaggatcagccgtaattattataattggcttggtgctggctactattgtggccatgtacgtgctgaccaaccagaaacataattgaatacagcagcaattggcaagctgcttacatagaactcgcggcgattggcatgccgccttaaaatttttattttatttttcttttcttttccgaatcggattttgtttttaatatttcaaaaaaaaaaaaaaaaaaaaaaaaaaaaaaaaaaaaaaaaaaaaaaaaaaaaaaaaaaaaaaaaaaaaaaaaaaaaaaaa

SEQ ID NO: 10-55 - skipped (46 entries)

SEQ ID NO: 56 - protein, 5 aa, synthetic construct
GPGPG

SEQ ID NO: 57 - protein, 594 aa, Severe acute respiratory syndrome-related coronavirus
TSRTLSYYKLGASQRVAGDSGFAAYSRYRIGNYCAAGTTQTACTDDNALAYYNTTKGGWPQIAQFAPSASAFFGMSRIGMEVTPSGTWLTYTGAIKLDDKDPNPANNAAIVLQLPQGTTLPKGFYAEGGVPINTNSSPDDQIGYYRRATRRIRLYLYALVYFLQSINFVRIIMRLWLCSTDVVYRAFDIYNDKVAGFAKFLKTRQKRTATKAYNVTQAFGRRGPEQTQPYVCNAPGCDVTDVTQLYLGGMSYYACLVGLMWLSYFIASFRLFARTRSMWSFNPETNILLNVPLHGTILTRPLLESELVILLNKHIDAYKTFPPTEPKKDKKKKADETQALPQRQKKQQTVTVGDSAEVAVKMFDAYVNTFSSTFNVMDLFMRIFTIGTVTLKQGEIKDATPSDFVRATATIPIQASLPFGWLILLQFAYANRNRFLYIIKLIFLWLLWPVLAVFQSASKIITLKKRWQLALSKGVHFVCNLLLLHVMSKHTDFSSEIIGYKAIDGGVTRDCVVLHSYFTSDYYQLYSTQLSTDTGVEHVTFFIYNKIVDEPEEHVQIHTIDGSSGVCNIVNVSLVKPSFYVYSRVKNLNSSRVP

SEQ ID NO: 58 - protein, 640 aa, Severe acute respiratory syndrome-related coronavirus
MAGTSRTLSYYKLGASQRVAGDSGFAAYSRYRIGNYCAAGTTQTACTDDNALAYYNTTKGGWPQIAQFAPSASAFFGMSRIGMEVTPSGTWLTYTGAIKLDDKDPNPANNAAIVLQLPQGTTLPKGFYAEGGVPINTNSSPDDQIGYYRRATRRIRLYLYALVYFLQSINFVRIIMRLWLCSTDVVYRAFDIYNDKVAGFAKFLKTRQKRTATKAYNVTQAFGRRGPEQTQPYVCNAPGCDVTDVTQLYLGGMSYYACLVGLMWLSYFIASFRLFARTRSMWSFNPETNILLNVPLHGTILTRPLLESELVILLNKHIDAYKTFPPTEPKKDKKKKADETQALPQRQKKQQTVTVGDSAEVAVKMFDAYVNTFSSTFNVMDLFMRIFTIGTVTLKQGEIKDATPSDFVRATATIPIQASLPFGWLILLQFAYANRNRFLYIIKLIFLWLLWPVLAVFQSASKIITLKKRWQLALSKGVHFVCNLLLLHVMSKHTDFSSEIIGYKAIDGGVTRDCVVLHSYFTSDYYQLYSTQLSTDTGVEHVTFFIYNKIVDEPEEHVQIHTIDGSSGVCNIVNVSLVKPSFYVYSRVKNLNSSRVPGPGPGAKFVAAWTLKAAAGPGPGQYIKANSKFIGITELGPGPG

SEQ ID NO: 59 - protein, 1273 aa, Severe acute respiratory syndrome-related coronavirus
MFVFLVLLPLVSSQCVNLTTRTQLPPAYTNSFTRGVYYPDKVFRSSVLHSTQDLFLPFFSNVTWFHAIHVSGTNGTKRFDNPVLPFNDGVYFASTEKSNIIRGWIFGTTLDSKTQSLLIVNNATNVVIKVCEFQFCNDPFLGVYYHKNNKSWMESEFRVYSSANNCTFEYVSQPFLMDLEGKQGNFKNLREFVFKNIDGYFKIYSKHTPINLVRDLPQGFSALEPLVDLPIGINITRFQTLLALHRSYLTPGDSSSGWTAGAAAYYVGYLQPRTFLLKYNENGTITDAVDCALDPLSETKCTLKSFTVEKGIYQTSNFRVQPTESIVRFPNITNLCPFGEVFNATRFASVYAWNRKRISNCVADYSVLYNSASFSTFKCYGVSPTKLNDLCFTNVYADSFVIRGDEVRQIAPGQTGKIADYNYKLPDDFTGCVIAWNSNNLDSKVGGNYNYLYRLFRKSNLKPFERDISTEIYQAGSTPCNGVEGFNCYFPLQSYGFQPTNGVGYQPYRVVVLSFELLHAPATVCGPKKSTNLVKNKCVNFNFNGLTGTGVLTESNKKFLPFQQFGRDIADTTDAVRDPQTLEILDITPCSFGGVSVITPGTNTSNQVAVLYQDVNCTEVPVAIHADQLTPTWRVYSTGSNVFQTRAGCLIGAEHVNNSYECDIPIGAGICASYQTQTNSPRRARSVASQSIIAYTMSLGAENSVAYSNNSIAIPTNFTISVTTEILPVSMTKTSVDCTMYICGDSTECSNLLLQYGSFCTQLNRALTGIAVEQDKNTQEVFAQVKQIYKTPPIKDFGGFNFSQILPDPSKPSKRSFIEDLLFNKVTLADAGFIKQYGDCLGDIAARDLICAQKFNGLTVLPPLLTDEMIAQYTSALLAGTITSGWTFGAGAALQIPFAMQMAYRFNGIGVTQNVLYENQKLIANQFNSAIGKIQDSLSSTASALGKLQDVVNQNAQALNTLVKQLSSNFGAISSVLNDILSRLDKVEAEVQIDRLITGRLQSLQTYVTQQLIRAAEIRASANLAATKMSECVLGQSKRVDFCGKGYHLMSFPQSAPHGVVFLHVTYVPAQEKNFTTAPAICHDGKAHFPREGVFVSNGTHWFVTQRNFYEPQIITTDNTFVSGNCDVVIGIVNNTVYDPLQPELDSFKEELDKYFKNHTSPDVDLGDISGINASVVNIQKEIDRLNEVAKNLNESLIDLQELGKYEQYIKWPWYIWLGFIAGLIAIVMVTIMLCCMTSCCSCLKGCCSCGSCCKFDEDDSEPVLKGVKLHYT

SEQ ID NO: 60 - protein, 1273 aa, Severe acute respiratory syndrome-related coronavirus
MFVFLVLLPLVSSQCVNLTTRTQLPPAYTNSFTRGVYYPDKVFRSSVLHSTQDLFLPFFSNVTWFHAIHVSGTNGTKRFDNPVLPFNDGVYFASTEKSNIIRGWIFGTTLDSKTQSLLIVNNATNVVIKVCEFQFCNDPFLGVYYHKNNKSWMESEFRVYSSANNCTFEYVSQPFLMDLEGKQGNFKNLREFVFKNIDGYFKIYSKHTPINLVRDLPQGFSALEPLVDLPIGINITRFQTLLALHRSYLTPGDSSSGWTAGAAAYYVGYLQPRTFLLKYNENGTITDAVDCALDPLSETKCTLKSFTVEKGIYQTSNFRVQPTESIVRFPNITNLCPFGEVFNATRFASVYAWNRKRISNCVADYSVLYNSASFSTFKCYGVSPTKLNDLCFTNVYADSFVIRGDEVRQIAPGQTGKIADYNYKLPDDFTGCVIAWNSNNLDSKVGGNYNYLYRLFRKSNLKPFERDISTEIYQAGSTPCNGVEGFNCYFPLQSYGFQPTNGVGYQPYRVVVLSFELLHAPATVCGPKKSTNLVKNKCVNFNFNGLTGTGVLTESNKKFLPFQQFGRDIADTTDAVRDPQTLEILDITPCSFGGVSVITPGTNTSNQVAVLYQGVNCTEVPVAIHADQLTPTWRVYSTGSNVFQTRAGCLIGAEHVNNSYECDIPIGAGICASYQTQTNSPVRARSVASQSIIAYTMSLGAENSVAYSNNSIAIPTNFTISVTTEILPVSMTKTSVDCTMYICGDSTECSNLLLQYGSFCTQLNRALTGIAVEQDKNTQEVFAQVKQIYKTPPIKDFGGFNFSQILPDPSKPSKNSFIEDLLFNKVTLADAGFIKQYGDCLGDIAARDLICAQKFNGLTVLPPLLTDEMIAQYTSALLAGTITSGWTFGAGAALQIPFAMQMAYRFNGIGVTQNVLYENQKLIANQFNSAIGKIQDSLSSTASALGKLQDVVNQNAQALNTLVKQLSSNFGAISSVLNDILSRLDPPEAEVQIDRLITGRLQSLQTYVTQQLIRAAEIRASANLAATKMSECVLGQSKRVDFCGKGYHLMSFPQSAPHGVVFLHVTYVPAQEKNFTTAPAICHDGKAHFPREGVFVSNGTHWFVTQRNFYEPQIITTDNTFVSGNCDVVIGIVNNTVYDPLQPELDSFKEELDKYFKNHTSPDVDLGDISGINASVVNIQKEIDRLNEVAKNLNESLIDLQELGKYEQYIKWPWYIWLGFIAGLIAIVMVTIMLCCMTSCCSCLKGCCSCGSCCKFDEDDSEPVLKGVKLHYT

SEQ ID NO: 61 - protein, 222 aa, Severe acute respiratory syndrome-related coronavirus
MADSNGTITVEELKKLLEQWNLVIGFLFLTWICLLQFAYANRNRFLYIIKLIFLWLLWPVTLACFVLAAVYRINWITGGIAIAMACLVGLMWLSYFIASFRLFARTRSMWSFNPETNILLNVPLHGTILTRPLLESELVIGAVILRGHLRIAGHHLGRCDIKDLPKEITVATSRTLSYYKLGASQRVAGDSGFAAYSRYRIGNYKLNTDHSSSSDNIALLVQ

SEQ ID NO: 62 - protein, 419 aa, Severe acute respiratory syndrome-related coronavirus
MSDNGPQNQRNAPRITFGGPSDSTGSNQNGERSGARSKQRRPQGLPNNTASWFTALTQHGKEDLKFPRGQGVPINTNSSPDDQIGYYRRATRRIRGGDGKMKDLSPRWYFYYLGTGPEAGLPYGANKDGIIWVATEGALNTPKDHIGTRNPANNAAIVLQLPQGTTLPKGFYAEGSRGGSQASSRSSSRSRNSSRNSTPGSSRGTSPARMAGNGGDAALALLLLDRLNQLESKMSGKGQQQQGQTVTKKSAAEASKKPRQKRTATKAYNVTQAFGRRGPEQTQGNFGDQELIRQGTDYKHWPQIAQFAPSASAFFGMSRIGMEVTPSGTWLTYTGAIKLDDKDPNFKDQVILLNKHIDAYKTFPPTEPKKDKKKKADETQALPQRQKKQQTVTLLPAADLDDFSKQLQQSMSSADSTQA

SEQ ID NO: 63 - protein, 75 aa, Severe acute respiratory syndrome-related coronavirus
MYSFVSEETGTLIVNSVLLFLAFVVFLLVTLAILTALRLCAYCCNIVNVSLVKPSFYVYSRVKNLNSSRVPDLLV

SEQ ID NO: 64-75 - skipped (12 entries)

SEQ ID NO: 76 - RNA, 29903 nt, Severe acute respiratory syndrome-related coronavirus
  source 1..29903: mol_type = other RNA
attaaaggtttataccttcccaggtaacaaaccaaccaactttcgatctcttgtagatctgttctctaaacgaactttaaaatctgtgtggctgtcactcggctgcatgcttagtgcactcacgcagtataattaataactaattactgtcgttgacaggacacgagtaactcgtctatcttctgcaggctgcttacggtttcgtccgtgttgcagccgatcatcagcacatctaggtttcgtccgggtgtgaccgaaaggtaagatggagagccttgtccctggtttcaacgagaaaacacacgtccaactcagtttgcctgttttacaggttcgcgacgtgctcgtacgtggctttggagactccgtggaggaggtcttatcagaggcacgtcaacatcttaaagatggcacttgtggcttagtagaagttgaaaaaggcgttttgcctcaacttgaacagccctatgtgttcatcaaacgttcggatgctcgaactgcacctcatggtcatgttatggttgagctggtagcagaactcgaaggcattcagtacggtcgtagtggtgagacacttggtgtccttgtccctcatgtgggcgaaataccagtggcttaccgcaaggttcttcttcgtaagaacggtaataaaggagctggtggccatagttacggcgccgatctaaagtcatttgacttaggcgacgagcttggcactgatccttatgaagattttcaagaaaactggaacactaaacatagcagtggtgttacccgtgaactcatgcgtgagcttaacggaggggcatacactcgctatgtcgataacaacttctgtggccctgatggctaccctcttgagtgcattaaagaccttctagcacgtgctggtaaagcttcatgcactttgtccgaacaactggactttattgacactaagaggggtgtatactgctgccgtgaacatgagcatgaaattgcttggtacacggaacgttctgaaaagagctatgaattgcagacaccttttgaaattaaattggcaaagaaatttgacaccttcaatggggaatgtccaaattttgtatttcccttaaattccataatcaagactattcaaccaagggttgaaaagaaaaagcttgatggctttatgggtagaattcgatctgtctatccagttgcgtcaccaaatgaatgcaaccaaatgtgcctttcaactctcatgaagtgtgatcattgtggtgaaacttcatggcagacgggcgattttgttaaagccacttgcgaattttgtggcactgagaatttgactaaagaaggtgccactacttgtggttacttaccccaaaatgctgttgttaaaatttattgtccagcatgtcacaattcagaagtaggacctgagcatagtcttgccgaataccataatgaatctggcttgaaaaccattcttcgtaagggtggtcgcactattgcctttggaggctgtgtgttctcttatgttggttgccataacaagtgtgcctattgggttccacgtgctagcgctaacataggttgtaaccatacaggtgttgttggagaaggttccgaaggtcttaatgacaaccttcttgaaatactccaaaaagagaaagtcaacatcaatattgttggtgactttaaacttaatgaagagatcgccattattttggcatctttttctgcttccacaagtgcttttgtggaaactgtgaaaggtttggattataaagcattcaaacaaattgttgaatcctgtggtaattttaaagttacaaaaggaaaagctaaaaaaggtgcctggaatattggtgaacagaaatcaatactgagtcctctttatgcatttgcatcagaggctgctcgtgttgtacgatcaattttctcccgcactcttgaaactgctcaaaattctgtgcgtgttttacagaaggccgctataacaatactagatggaatttcacagtattcactgagactcattgatgctatgatgttcacatctgatttggctactaacaatctagttgtaatggcctacattacaggtggtgttgttcagttgacttcgcagtggctaactaacatctttggcactgtttatgaaaaactcaaacccgtccttgattggcttgaagagaagtttaaggaaggtgtagagtttcttagagacggttgggaaattgttaaatttatctcaacctgtgcttgtgaaattgtcggtggacaaattgtcacctgtgcaaaggaaattaaggagagtgttcagacattctttaagcttgtaaataaatttttggctttgtgtgctgactctatcattattggtggagctaaacttaaagccttgaatttaggtgaaacatttgtcacgcactcaaagggattgtacagaaagtgtgttaaatccagagaagaaactggcctactcatgcctctaaaagccccaaaagaaattatcttcttagagggagaaacacttcccacagaagtgttaacagaggaagttgtcttgaaaactggtgatttacaaccattagaacaacctactagtgaagctgttgaagctccattggttggtacaccagtttgtattaacgggcttatgttgctcgaaatcaaagacacagaaaagtactgtgcccttgcacctaatatgatggtaacaaacaataccttcacactcaaaggcggtgcaccaacaaaggttacttttggtgatgacactgtgatagaagtgcaaggttacaagagtgtgaatatcacttttgaacttgatgaaaggattgataaagtacttaatgagaagtgctctgcctatacagttgaactcggtacagaagtaaatgagttcgcctgtgttgtggcagatgctgtcataaaaactttgcaaccagtatctgaattacttacaccactgggcattgatttagatgagtggagtatggctacatactacttatttgatgagtctggtgagtttaaattggcttcacatatgtattgttctttctaccctccagatgaggatgaagaagaaggtgattgtgaagaagaagagtttgagccatcaactcaatatgagtatggtactgaagatgattaccaaggtaaacctttggaatttggtgccacttctgctgctcttcaacctgaagaagagcaagaagaagattggttagatgatgatagtcaacaaactgttggtcaacaagacggcagtgaggacaatcagacaactactattcaaacaattgttgaggttcaacctcaattagagatggaacttacaccagttgttcagactattgaagtgaatagttttagtggttatttaaaacttactgacaatgtatacattaaaaatgcagacattgtggaagaagctaaaaaggtaaaaccaacagtggttgttaatgcagccaatgtttaccttaaacatggaggaggtgttgcaggagccttaaataaggctactaacaatgccatgcaagttgaatctgatgattacatagctactaatggaccacttaaagtgggtggtagttgtgttttaagcggacacaatcttgctaaacactgtcttcatgttgtcggcccaaatgttaacaaaggtgaagacattcaacttcttaagagtgcttatgaaaattttaatcagcacgaagttctacttgcaccattattatcagctggtatttttggtgctgaccctatacattctttaagagtttgtgtagatactgttcgcacaaatgtctacttagctgtctttgataaaaatctctatgacaaacttgtttcaagctttttggaaatgaagagtgaaaagcaagttgaacaaaagatcgctgagattcctaaagaggaagttaagccatttataactgaaagtaaaccttcagttgaacagagaaaacaagatgataagaaaatcaaagcttgtgttgaagaagttacaacaactctggaagaaactaagttcctcacagaaaacttgttactttatattgacattaatggcaatcttcatccagattctgccactcttgttagtgacattgacatcactttcttaaagaaagatgctccatatatagtgggtgatgttgttcaagagggtgttttaactgctgtggttatacctactaaaaaggctggtggcactactgaaatgctagcgaaagctttgagaaaagtgccaacagacaattatataaccacttacccgggtcagggtttaaatggttacactgtagaggaggcaaagacagtgcttaaaaagtgtaaaagtgccttttacattctaccatctattatctctaatgagaagcaagaaattcttggaactgtttcttggaatttgcgagaaatgcttgcacatgcagaagaaacacgcaaattaatgcctgtctgtgtggaaactaaagccatagtttcaactatacagcgtaaatataagggtattaaaatacaagagggtgtggttgattatggtgctagattttacttttacaccagtaaaacaactgtagcgtcacttatcaacacacttaacgatctaaatgaaactcttgttacaatgccacttggctatgtaacacatggcttaaatttggaagaagctgctcggtatatgagatctctcaaagtgccagctacagtttctgtttcttcacctgatgctgttacagcgtataatggttatcttacttcttcttctaaaacacctgaagaacattttattgaaaccatctcacttgctggttcctataaagattggtcctattctggacaatctacacaactaggtatagaatttcttaagagaggtgataaaagtgtatattacactagtaatcctaccacattccacctagatggtgaagttatcacctttgacaatcttaagacacttctttctttgagagaagtgaggactattaaggtgtttacaacagtagacaacattaacctccacacgcaagttgtggacatgtcaatgacatatggacaacagtttggtccaacttatttggatggagctgatgttactaaaataaaacctcataattcacatgaaggtaaaacattttatgttttacctaatgatgacactctacgtgttgaggcttttgagtactaccacacaactgatcctagttttctgggtaggtacatgtcagcattaaatcacactaaaaagtggaaatacccacaagttaatggtttaacttctattaaatgggcagataacaactgttatcttgccactgcattgttaacactccaacaaatagagttgaagtttaatccacctgctctacaagatgcttattacagagcaagggctggtgaagctgctaacttttgtgcacttatcttagcctactgtaataagacagtaggtgagttaggtgatgttagagaaacaatgagttacttgtttcaacatgccaatttagattcttgcaaaagagtcttgaacgtggtgtgtaaaacttgtggacaacagcagacaacccttaagggtgtagaagctgttatgtacatgggcacactttcttatgaacaatttaagaaaggtgttcagataccttgtacgtgtggtaaacaagctacaaaatatctagtacaacaggagtcaccttttgttatgatgtcagcaccacctgctcagtatgaacttaagcatggtacatttacttgtgctagtgagtacactggtaattaccagtgtggtcactataaacatataacttctaaagaaactttgtattgcatagacggtgctttacttacaaagtcctcagaatacaaaggtcctattacggatgttttctacaaagaaaacagttacacaacaaccataaaaccagttacttataaattggatggtgttgtttgtacagaaattgaccctaagttggacaattattataagaaagacaattcttatttcacagagcaaccaattgatcttgtaccaaaccaaccatatccaaacgcaagcttcgataattttaagtttgtatgtgataatatcaaatttgctgatgatttaaaccagttaactggttataagaaacctgcttcaagagagcttaaagttacatttttccctgacttaaatggtgatgtggtggctattgattataaacactacacaccctcttttaagaaaggagctaaattgttacataaacctattgtttggcatgttaacaatgcaactaataaagccacgtataaaccaaatacctggtgtatacgttgtctttggagcacaaaaccagttgaaacatcaaattcgtttgatgtactgaagtcagaggacgcgcagggaatggataatcttgcctgcgaagatctaaaaccagtctctgaagaagtagtggaaaatcctaccatacagaaagacgttcttgagtgtaatgtgaaaactaccgaagttgtaggagacattatacttaaaccagcaaataatagtttaaaaattacagaagaggttggccacacagatctaatggctgcttatgtagacaattctagtcttactattaagaaacctaatgaattatctagagtattaggtttgaaaacccttgctactcatggtttagctgctgttaatagtgtcccttgggatactatagctaattatgctaagccttttcttaacaaagttgttagtacaactactaacatagttacacggtgtttaaaccgtgtttgtactaattatatgccttatttctttactttattgctacaattgtgtacttttactagaagtacaaattctagaattaaagcatctatgccgactactatagcaaagaatactgttaagagtgtcggtaaattttgtctagaggcttcatttaattatttgaagtcacctaatttttctaaactgataaatattataatttggtttttactattaagtgtttgcctaggttctttaatctactcaaccgctgctttaggtgttttaatgtctaatttaggcatgccttcttactgtactggttacagagaaggctatttgaactctactaatgtcactattgcaacctactgtactggttctataccttgtagtgtttgtcttagtggtttagattctttagacacctatccttctttagaaactatacaaattaccatttcatcttttaaatgggatttaactgcttttggcttagttgcagagtggtttttggcatatattcttttcactaggtttttctatgtacttggattggctgcaatcatgcaattgtttttcagctattttgcagtacattttattagtaattcttggcttatgtggttaataattaatcttgtacaaatggccccgatttcagctatggttagaatgtacatcttctttgcatcattttattatgtatggaaaagttatgtgcatgttgtagacggttgtaattcatcaacttgtatgatgtgttacaaacgtaatagagcaacaagagtcgaatgtacaactattgttaatggtgttagaaggtccttttatgtctatgctaatggaggtaaaggcttttgcaaactacacaattggaattgtgttaattgtgatacattctgtgctggtagtacatttattagtgatgaagttgcgagagacttgtcactacagtttaaaagaccaataaatcctactgaccagtcttcttacatcgttgatagtgttacagtgaagaatggttccatccatctttactttgataaagctggtcaaaagacttatgaaagacattctctctctcattttgttaacttagacaacctgagagctaataacactaaaggttcattgcctattaatgttatagtttttgatggtaaatcaaaatgtgaagaatcatctgcaaaatcagcgtctgtttactacagtcagcttatgtgtcaacctatactgttactagatcaggcattagtgtctgatgttggtgatagtgcggaagttgcagttaaaatgtttgatgcttacgttaatacgttttcatcaacttttaacgtaccaatggaaaaactcaaaacactagttgcaactgcagaagctgaacttgcaaagaatgtgtccttagacaatgtcttatctacttttatttcagcagctcggcaagggtttgttgattcagatgtagaaactaaagatgttgttgaatgtcttaaattgtcacatcaatctgacatagaagttactggcgatagttgtaataactatatgctcacctataacaaagttgaaaacatgacaccccgtgaccttggtgcttgtattgactgtagtgcgcgtcatattaatgcgcaggtagcaaaaagtcacaacattgctttgatatggaacgttaaagatttcatgtcattgtctgaacaactacgaaaacaaatacgtagtgctgctaaaaagaataacttaccttttaagttgacatgtgcaactactagacaagttgttaatgttgtaacaacaaagatagcacttaagggtggtaaaattgttaataattggttgaagcagttaattaaagttacacttgtgttcctttttgttgctgctattttctatttaataacacctgttcatgtcatgtctaaacatactgacttttcaagtgaaatcataggatacaaggctattgatggtggtgtcactcgtgacatagcatctacagatacttgttttgctaacaaacatgctgattttgacacatggtttagccagcgtggtggtagttatactaatgacaaagcttgcccattgattgctgcagtcataacaagagaagtgggttttgtcgtgcctggtttgcctggcacgatattacgcacaactaatggtgactttttgcatttcttacctagagtttttagtgcagttggtaacatctgttacacaccatcaaaacttatagagtacactgactttgcaacatcagcttgtgttttggctgctgaatgtacaatttttaaagatgcttctggtaagccagtaccatattgttatgataccaatgtactagaaggttctgttgcttatgaaagtttacgccctgacacacgttatgtgctcatggatggctctattattcaatttcctaacacctaccttgaaggttctgttagagtggtaacaacttttgattctgagtactgtaggcacggcacttgtgaaagatcagaagctggtgtttgtgtatctactagtggtagatgggtacttaacaatgattattacagatctttaccaggagttttctgtggtgtagatgctgtaaatttacttactaatatgtttacaccactaattcaacctattggtgctttggacatatcagcatctatagtagctggtggtattgtagctatcgtagtaacatgccttgcctactattttatgaggtttagaagagcttttggtgaatacagtcatgtagttgcctttaatactttactattccttatgtcattcactgtactctgtttaacaccagtttactcattcttacctggtgtttattctgttatttacttgtacttgacattttatcttactaatgatgtttcttttttagcacatattcagtggatggttatgttcacacctttagtacctttctggataacaattgcttatatcatttgtatttccacaaagcatttctattggttctttagtaattacctaaagagacgtgtagtctttaatggtgtttcctttagtacttttgaagaagctgcgctgtgcacctttttgttaaataaagaaatgtatctaaagttgcgtagtgatgtgctattacctcttacgcaatataatagatacttagctctttataataagtacaagtattttagtggagcaatggatacaactagctacagagaagctgcttgttgtcatctcgcaaaggctctcaatgacttcagtaactcaggttctgatgttctttaccaaccaccacaaacctctatcacctcagctgttttgcagagtggttttagaaaaatggcattcccatctggtaaagttgagggttgtatggtacaagtaacttgtggtacaactacacttaacggtctttggcttgatgacgtagtttactgtccaagacatgtgatctgcacctctgaagacatgcttaaccctaattatgaagatttactcattcgtaagtctaatcataatttcttggtacaggctggtaatgttcaactcagggttattggacattctatgcaaaattgtgtacttaagcttaaggttgatacagccaatcctaagacacctaagtataagtttgttcgcattcaaccaggacagactttttcagtgttagcttgttacaatggttcaccatctggtgtttaccaatgtgctatgaggcccaatttcactattaagggttcattccttaatggttcatgtggtagtgttggttttaacatagattatgactgtgtctctttttgttacatgcaccatatggaattaccaactggagttcatgctggcacagacttagaaggtaacttttatggaccttttgttgacaggcaaacagcacaagcagctggtacggacacaactattacagttaatgttttagcttggttgtacgctgctgttataaatggagacaggtggtttctcaatcgatttaccacaactcttaatgactttaaccttgtggctatgaagtacaattatgaacctctaacacaagaccatgttgacatactaggacctctttctgctcaaactggaattgccgttttagatatgtgtgcttcattaaaagaattactgcaaaatggtatgaatggacgtaccatattgggtagtgctttattagaagatgaatttacaccttttgatgttgttagacaatgctcaggtgttactttccaaagtgcagtgaaaagaacaatcaagggtacacaccactggttgttactcacaattttgacttcacttttagttttagtccagagtactcaatggtctttgttcttttttttgtatgaaaatgcctttttaccttttgctatgggtattattgctatgtctgcttttgcaatgatgtttgtcaaacataagcatgcatttctctgtttgtttttgttaccttctcttgccactgtagcttattttaatatggtctatatgcctgctagttgggtgatgcgtattatgacatggttggatatggttgatactagtttgtctggttttaagctaaaagactgtgttatgtatgcatcagctgtagtgttactaatccttatgacagcaagaactgtgtatgatgatggtgctaggagagtgtggacacttatgaatgtcttgacactcgtttataaagtttattatggtaatgctttagatcaagccatttccatgtgggctcttataatctctgttacttctaactactcaggtgtagttacaactgtcatgtttttggccagaggtattgtttttatgtgtgttgagtattgccctattttcttcataactggtaatacacttcagtgtataatgctagtttattgtttcttaggctatttttgtacttgttactttggcctcttttgtttactcaaccgctactttagactgactcttggtgtttatgattacttagtttctacacaggagtttagatatatgaattcacagggactactcccacccaagaatagcatagatgccttcaaactcaacattaaattgttgggtgttggtggcaaaccttgtatcaaagtagccactgtacagtctaaaatgtcagatgtaaagtgcacatcagtagtcttactctcagttttgcaacaactcagagtagaatcatcatctaaattgtgggctcaatgtgtccagttacacaatgacattctcttagctaaagatactactgaagcctttgaaaaaatggtttcactactttctgttttgctttccatgcagggtgctgtagacataaacaagctttgtgaagaaatgctggacaacagggcaaccttacaagctatagcctcagagtttagttcccttccatcatatgcagcttttgctactgctcaagaagcttatgagcaggctgttgctaatggtgattctgaagttgttcttaaaaagttgaagaagtctttgaatgtggctaaatctgaatttgaccgtgatgcagccatgcaacgtaagttggaaaagatggctgatcaagctatgacccaaatgtataaacaggctagatctgaggacaagagggcaaaagttactagtgctatgcagacaatgcttttcactatgcttagaaagttggataatgatgcactcaacaacattatcaacaatgcaagagatggttgtgttcccttgaacataatacctcttacaacagcagccaaactaatggttgtcataccagactataacacatataaaaatacgtgtgatggtacaacatttacttatgcatcagcattgtgggaaatccaacaggttgtagatgcagatagtaaaattgttcaacttagtgaaattagtatggacaattcacctaatttagcatggcctcttattgtaacagctttaagggccaattctgctgtcaaattacagaataatgagcttagtcctgttgcactacgacagatgtcttgtgctgccggtactacacaaactgcttgcactgatgacaatgcgttagcttactacaacacaacaaagggaggtaggtttgtacttgcactgttatccgatttacaggatttgaaatgggctagattccctaagagtgatggaactggtactatctatacagaactggaaccaccttgtaggtttgttacagacacacctaaaggtcctaaagtgaagtatttatactttattaaaggattaaacaacctaaatagaggtatggtacttggtagtttagctgccacagtacgtctacaagctggtaatgcaacagaagtgcctgccaattcaactgtattatctttctgtgcttttgctgtagatgctgctaaagcttacaaagattatctagctagtgggggacaaccaatcactaattgtgttaagatgttgtgtacacacactggtactggtcaggcaataacagttacaccggaagccaatatggatcaagaatcctttggtggtgcatcgtgttgtctgtactgccgttgccacatagatcatccaaatcctaaaggattttgtgacttaaaaggtaagtatgtacaaatacctacaacttgtgctaatgaccctgtgggttttacacttaaaaacacagtctgtaccgtctgcggtatgtggaaaggttatggctgtagttgtgatcaactccgcgaacccatgcttcagtcagctgatgcacaatcgtttttaaacgggtttgcggtgtaagtgcagcccgtcttacaccgtgcggcacaggcactagtactgatgtcgtatacagggcttttgacatctacaatgataaagtagctggttttgctaaattcctaaaaactaattgttgtcgcttccaagaaaaggacgaagatgacaatttaattgattcttactttgtagttaagagacacactttctctaactaccaacatgaagaaacaatttataatttacttaaggattgtccagctgttgctaaacatgacttctttaagtttagaatagacggtgacatggtaccacatatatcacgtcaacgtcttactaaatacacaatggcagacctcgtctatgctttaaggcattttgatgaaggtaattgtgacacattaaaagaaatacttgtcacatacaattgttgtgatgatgattatttcaataaaaaggactggtatgattttgtagaaaacccagatatattacgcgtatacgccaacttaggtgaacgtgtacgccaagctttgttaaaaacagtacaattctgtgatgccatgcgaaatgctggtattgttggtgtactgacattagataatcaagatctcaatggtaactggtatgatttcggtgatttcatacaaaccacgccaggtagtggagttcctgttgtagattcttattattcattgttaatgcctatattaaccttgaccagggctttaactgcagagtcacatgttgacactgacttaacaaagccttacattaagtgggatttgttaaaatatgacttcacggaagagaggttaaaactctttgaccgttattttaaatattgggatcagacataccacccaaattgtgttaactgtttggatgacagatgcattctgcattgtgcaaactttaatgttttattctctacagtgttcccacctacaagttttggaccactagtgagaaaaatatttgttgatggtgttccatttgtagtttcaactggataccacttcagagagctaggtgttgtacataatcaggatgtaaacttacatagctctagacttagttttaaggaattacttgtgtatgctgctgaccctgctatgcacgctgcttctggtaatctattactagataaacgcactacgtgcttttcagtagctgcacttactaacaatgttgcttttcaaactgtcaaacccggtaattttaacaaagacttctatgactttgctgtgtctaagggtttctttaaggaaggaagttctgttgaattaaaacacttcttctttgctcaggatggtaatgctgctatcagcgattatgactactatcgttataatctaccaacaatgtgtgatatcagacaactactatttgtagttgaagttgttgataagtactttgattgttacgatggtggctgtattaatgctaaccaagtcatcgtcaacaacctagacaaatcagctggttttccatttaataaatggggtaaggctagactttattatgattcaatgagttatgaggatcaagatgcacttttcgcatatacaaaacgtaatgtcatccctactataactcaaatgaatcttaagtatgccattagtgcaaagaatagagctcgcaccgtagctggtgtctctatctgtagtactatgaccaatagacagtttcatcaaaaattattgaaatcaatagccgccactagaggagctactgtagtaattggaacaagcaaattctatggtggttggcacaacatgttaaaaactgtttatagtgatgtagaaaaccctcaccttatgggttgggattatcctaaatgtgatagagccatgcctaacatgcttagaattatggcctcacttgttcttgctcgcaaacatacaacgtgttgtagcttgtcacaccgtttctatagattagctaatgagtgtgctcaagtattgagtgaaatggtcatgtgtggcggttcactatatgttaaaccaggtggaacctcatcaggagatgccacaactgcttatgctaatagtgtttttaacatttgtcaagctgtcacggccaatgttaatgcacttttatctactgatggtaacaaaattgccgataagtatgtccgcaatttacaacacagactttatgagtgtctctatagaaatagagatgttgacacagactttgtgaatgagttttacgcatatttgcgtaaacatttctcaatgatgatactctctgacgatgctgttgtgtgtttcaatagcacttatgcatctcaaggtctagtggctagcataaagaactttaagtcagttctttattatcaaaacaatgtttttatgtctgaagcaaaatgttggactgagactgaccttactaaaggacctcatgaattttgctctcaacatacaatgctagttaaacagggtgatgattatgtgtaccttccttacccagatccatcaagaatcctaggggccggctgttttgtagatgatatcgtaaaaacagatggtacacttatgattgaacggttcgtgtctttagctatagatgcttacccacttactaaacatcctaatcaggagtatgctgatgtctttcatttgtacttacaatacataagaaagctacatgatgagttaacaggacacatgttagacatgtattctgttatgcttactaatgataacacttcaaggtattgggaacctgagttttatgaggctatgtacacaccgcatacagtcttacaggctgttggggcttgtgttctttgcaattcacagacttcattaagatgtggtgcttgcatacgtagaccattcttatgttgtaaatgctgttacgaccatgtcatatcaacatcacataaattagtcttgtctgttaatccgtatgtttgcaatgctccaggttgtgatgtcacagatgtgactcaactttacttaggaggtatgagctattattgtaaatcacataaaccacccattagttttccattgtgtgctaatggacaagtttttggtttatataaaaatacatgtgttggtagcgataatgttactgactttaatgcaattgcaacatgtgactggacaaatgctggtgattacattttagctaacacctgtactgaaagactcaagctttttgcagcagaaacgctcaaagctactgaggagacatttaaactgtcttatggtattgctactgtacgtgaagtgctgtctgacagagaattacatctttcatgggaagttggtaaacctagaccaccacttaaccgaaattatgtctttactggttatcgtgtaactaaaaacagtaaagtacaaataggagagtacacctttgaaaaaggtgactatggtgatgctgttgtttaccgaggtacaacaacttacaaattaaatgttggtgattattttgtgctgacatcacatacagtaatgccattaagtgcacctacactagtgccacaagagcactatgttagaattactggcttatacccaacactcaatatctcagatgagttttctagcaatgttgcaaattatcaaaaggttggtatgcaaaagtattctacactccagggaccacctggtactggtaagagtcattttgctattggcctagctctctactacccttctgctcgcatagtgtatacagcttgctctcatgccgctgttgatgcactatgtgagaaggcattaaaatatttgcctatagataaatgtagtagaattatacctgcacgtgctcgtgtagagtgttttgataaattcaaagtgaattcaacattagaacagtatgtcttttgtactgtaaatgcattgcctgagacgacagcagatatagttgtctttgatgaaatttcaatggccacaaattatgatttgagtgttgtcaatgccagattacgtgctaagcactatgtgtacattggcgaccctgctcaattacctgcaccacgcacattgctaactaagggcacactagaaccagaatatttcaattcagtgtgtagacttatgaaaactataggtccagacatgttcctcggaacttgtcggcgttgtcctgctgaaattgttgacactgtgagtgctttggtttatgataataagcttaaagcacataaagacaaatcagctcaatgctttaaaatgttttataagggtgttatcacgcatgatgtttcatctgcaattaacaggccacaaataggcgtggtaagagaattccttacacgtaaccctgcttggagaaaagctgtctttatttcaccttataattcacagaatgctgtagcctcaaagattttgggactaccaactcaaactgttgattcatcacagggctcagaatatgactatgtcatattcactcaaaccactgaaacagctcactcttgtaatgtaaacagatttaatgttgctattaccagagcaaaagtaggcatactttgcataatgtctgatagagacctttatgacaagttgcaatttacaagtcttgaaattccacgtaggaatgtggcaactttacaagctgaaaatgtaacaggactctttaaagattgtagtaaggtaatcactgggttacatcctacacaggcacctacacacctcagtgttgacactaaattcaaaactgaaggtttatgtgttgacatacctggcatacctaaggacatgacctatagaagactcatctctatgatgggttttaaaatgaattatcaagttaatggttaccctaacatgtttatcacccgcgaagaagctataagacatgtacgtgcatggattggcttcgatgtcgaggggtgtcatgctactagagaagctgttggtaccaatttacctttacagctaggtttttctacaggtgttaacctagttgctgtacctacaggttatgttgatacacctaataatacagatttttccagagttagtgctaaaccaccgcctggagatcaatttaaacacctcataccacttatgtacaaaggacttccttggaatgtagtgcgtataaagattgtacaaatgttaagtgacacacttaaaaatctctctgacagagtcgtatttgtcttatgggcacatggctttgagttgacatctatgaagtattttgtgaaaataggacctgagcgcacctgttgtctatgtgatagacgtgccacatgcttttccactgcttcagacacttatgcctgttggcatcattctattggatttgattacgtctataatccgtttatgattgatgttcaacaatggggttttacaggtaacctacaaagcaaccatgatctgtattgtcaagtccatggtaatgcacatgtagctagttgtgatgcaatcatgactaggtgtctagctgtccacgagtgctttgttaagcgtgttgactggactattgaatatcctataattggtgatgaactgaagattaatgcggcttgtagaaaggttcaacacatggttgttaaagctgcattattagcagacaaattcccagttcttcacgacattggtaaccctaaagctattaagtgtgtacctcaagctgatgtagaatggaagttctatgatgcacagccttgtagtgacaaagcttataaaatagaagaattattctattcttatgccacacattctgacaaattcacagatggtgtatgcctattttggaattgcaatgtcgatagatatcctgctaattccattgtttgtagatttgacactagagtgctatctaaccttaacttgcctggttgtgatggtggcagtttgtatgtaaataaacatgcattccacacaccagcttttgataaaagtgcttttgttaatttaaaacaattaccatttttctattactctgacagtccatgtgagtctcatggaaaacaagtagtgtcagatatagattatgtaccactaaagtctgctacgtgtataacacgttgcaatttaggtggtgctgtctgtagacatcatgctaatgagtacagattgtatctcgatgcttataacatgatgatctcagctggctttagcttgtgggtttacaaacaatttgatacttataacctctggaacacttttacaagacttcagagtttagaaaatgtggcttttaatgttgtaaataagggacactttgatggacaacagggtgaagtaccagtttctatcattaataacactgtttacacaaaagttgatggtgttgatgtagaattgtttgaaaataaaacaacattacctgttaatgtagcatttgagctttgggctaagcgcaacattaaaccagtaccagaggtgaaaatactcaataatttgggtgtggacattgctgctaatactgtgatctgggactacaaaagagatgctccagcacatatatctactattggtgtttgttctatgactgacatagccaagaaaccaactgaaacgatttgtgcaccactcactgtcttttttgatggtagagttgatggtcaagtagacttatttagaaatgcccgtaatggtgttcttattacagaaggtagtgttaaaggtttacaaccatctgtaggtcccaaacaagctagtcttaatggagtcacattaattggagaagccgtaaaaacacagttcaattattataagaaagttgatggtgttgtccaacaattacctgaaacttactttactcagagtagaaatttacaagaatttaaacccaggagtcaaatggaaattgatttcttagaattagctatggatgaattcattgaacggtataaattagaaggctatgccttcgaacatatcgtttatggagattttagtcatagtcagttaggtggtttacatctactgattggactagctaaacgttttaaggaatcaccttttgaattagaagattttattcctatggacagtacagttaaaaactatttcataacagatgcgcaaacaggttcatctaagtgtgtgtgttctgttattgatttattacttgatgattttgttgaaataataaaatcccaagatttatctgtagtttctaaggttgtcaaagtgactattgactatacagaaatttcatttatgctttggtgtaaagatggccatgtagaaacattttacccaaaattacaatctagtcaagcgtggcaaccgggtgttgctatgcctaatctttacaaaatgcaaagaatgctattagaaaagtgtgaccttcaaaattatggtgatagtgcaacattacctaaaggcataatgatgaatgtcgcaaaatatactcaactgtgtcaatatttaaacacattaacattagctgtaccctataatatgagagttatacattttggtgctggttctgataaaggagttgcaccaggtacagctgttttaagacagtggttgcctacgggtacgctgcttgtcgattcagatcttaatgactttgtctctgatgcagattcaactttgattggtgattgtgcaactgtacatacagctaataaatgggatctcattattagtgatatgtacgaccctaagactaaaaatgttacaaaagaaaatgactctaaagagggttttttcacttacatttgtgggtttatacaacaaaagctagctcttggaggttccgtggctataaagataacagaacattcttggaatgctgatctttataagctcatgggacacttcgcatggtggacagcctttgttactaatgtgaatgcgtcatcatctgaagcatttttaattggatgtaattatcttggcaaaccacgcgaacaaatagatggttatgtcatgcatgcaaattacatattttggaggaatacaaatccaattcagttgtcttcctattctttatttgacatgagtaaatttccccttaaattaaggggtactgctgttatgtctttaaaagaaggtcaaatcaatgatatgattttatctcttcttagtaaaggtagacttataattagagaaaacaacagagttgttatttctagtgatgttcttgttaacaactaaacgaacaatgtttgtttttcttgttttattgccactagtctctagtcagtgtgttaatcttacaaccagaactcaattaccccctgcatacactaattctttcacacgtggtgtttattaccctgacaaagttttcagatcctcagttttacattcaactcaggacttgttcttacctttcttttccaatgttacttggttccatgctatacatgtctctgggaccaatggtactaagaggtttgataaccctgtcctaccatttaatgatggtgtttattttgcttccactgagaagtctaacataataagaggctggatttttggtactactttagattcgaagacccagtccctacttattgttaataacgctactaatgttgttattaaagtctgtgaatttcaattttgtaatgatccatttttgggtgtttattaccacaaaaacaacaaaagttggatggaaagtgagttcagagtttattctagtgcgaataattgcacttttgaatatgtctctcagccttttcttatggaccttgaaggaaaacagggtaatttcaaaaatcttagggaatttgtgtttaagaatattgatggttattttaaaatatattctaagcacacgcctattaatttagtgcgtgatctccctcagggtttttcggctttagaaccattggtagatttgccaataggtattaacatcactaggtttcaaactttacttgctttacatagaagttatttgactcctggtgattcttcttcaggttggacagctggtgctgcagcttattatgtgggttatcttcaacctaggacttttctattaaaatataatgaaaatggaaccattacagatgctgtagactgtgcacttgaccctctctcagaaacaaagtgtacgttgaaatccttcactgtagaaaaaggaatctatcaaacttctaactttagagtccaaccaacagaatctattgttagatttcctaatattacaaacttgtgcccttttggtgaagtttttaacgccaccagatttgcatctgtttatgcttggaacaggaagagaatcagcaactgtgttgctgattattctgtcctatataattccgcatcattttccacttttaagtgttatggagtgtctcctactaaattaaatgatctctgctttactaatgtctatgcagattcatttgtaattagaggtgatgaagtcagacaaatcgctccagggcaaactggaaagattgctgattataattataaattaccagatgattttacaggctgcgttatagcttggaattctaacaatcttgattctaaggttggtggtaattataattacctgtatagattgtttaggaagtctaatctcaaaccttttgagagagatatttcaactgaaatctatcaggccggtagcacaccttgtaatggtgttgaaggttttaattgttactttcctttacaatcatatggtttccaacccactaatggtgttggttaccaaccatacagagtagtagtactttcttttgaacttctacatgcaccagcaactgtttgtggacctaaaaagtctactaatttggttaaaaacaaatgtgtcaatttcaacttcaatggtttaacaggcacaggtgttcttactgagtctaacaaaaagtttctgcctttccaacaatttggcagagacattgctgacactactgatgctgtccgtgatccacagacacttgagattcttgacattacaccatgttcttttggtggtgtcagtgttataacaccaggaacaaatacttctaaccaggttgctgttctttatcaggatgttaactgcacagaagtccctgttgctattcatgcagatcaacttactcctacttggcgtgtttattctacaggttctaatgtttttcaaacacgtgcaggctgtttaataggggctgaacatgtcaacaactcatatgagtgtgacatacccattggtgcaggtatatgcgctagttatcagactcagactaattctcctcggcgggcacgtagtgtagctagtcaatccatcattgcctacactatgtcacttggtgcagaaaattcagttgcttactctaataactctattgccatacccacaaattttactattagtgttaccacagaaattctaccagtgtctatgaccaagacatcagtagattgtacaatgtacatttgtggtgattcaactgaatgcagcaatcttttgttgcaatatggcagtttttgtacacaattaaaccgtgctttaactggaatagctgttgaacaagacaaaaacacccaagaagtttttgcacaagtcaaacaaatttacaaaacaccaccaattaaagattttggtggttttaatttttcacaaatattaccagatccatcaaaaccaagcaagaggtcatttattgaagatctacttttcaacaaagtgacacttgcagatgctggcttcatcaaacaatatggtgattgccttggtgatattgctgctagagacctcatttgtgcacaaaagtttaacggccttactgttttgccacctttgctcacagatgaaatgattgctcaatacacttctgcactgttagcgggtacaatcacttctggttggacctttggtgcaggtgctgcattacaaataccatttgctatgcaaatggcttataggtttaatggtattggagttacacagaatgttctctatgagaaccaaaaattgattgccaaccaatttaatagtgctattggcaaaattcaagactcactttcttccacagcaagtgcacttggaaaacttcaagatgtggtcaaccaaaatgcacaagctttaaacacgcttgttaaacaacttagctccaattttggtgcaatttcaagtgttttaaatgatatcctttcacgtcttgacaaagttgaggctgaagtgcaaattgataggttgatcacaggcagacttcaaagtttgcagacatatgtgactcaacaattaattagagctgcagaaatcagagcttctgctaatcttgctgctactaaaatgtcagagtgtgtacttggacaatcaaaaagagttgatttttgtggaaagggctatcatcttatgtccttccctcagtcagcacctcatggtgtagtcttcttgcatgtgacttatgtccctgcacaagaaaagaacttcacaactgctcctgccatttgtcatgatggaaaagcacactttcctcgtgaaggtgtctttgtttcaaatggcacacactggtttgtaacacaaaggaatttttatgaaccacaaatcattactacagacaacacatttgtgtctggtaactgtgatgttgtaataggaattgtcaacaacacagtttatgatcctttgcaacctgaattagactcattcaaggaggagttagataaatattttaagaatcatacatcaccagatgttgatttaggtgacatctctggcattaatgcttcagttgtaaacattcaaaaagaaattgaccgcctcaatgaggttgccaagaatttaaatgaatctctcatcgatctccaagaacttggaaagtatgagcagtatataaaatggccatggtacatttggctaggttttatagctggcttgattgccatagtaatggtgacaattatgctttgctgtatgaccagttgctgtagttgtctcaagggctgttgttcttgtggatcctgctgcaaatttgatgaagacgactctgagccagtgctcaaaggagtcaaattacattacacataaacgaacttatggatttgtttatgagaatcttcacaattggaactgtaactttgaagcaaggtgaaatcaaggatgctactccttcagattttgttcgcgctactgcaacgataccgatacaagcctcactccctttcggatggcttattgttggcgttgcacttcttgctgtttttcagagcgcttccaaaatcataaccctcaaaaagagatggcaactagcactctccaagggtgttcactttgtttgcaacttgctgttgttgtttgtaacagtttactcacaccttttgctcgttgctgctggccttgaagccccttttctctatctttatgctttagtctacttcttgcagagtataaactttgtaagaataataatgaggctttggctttgctggaaatgccgttccaaaaacccattactttatgatgccaactattttctttgctggcatactaattgttacgactattgtataccttacaatagtgtaacttcttcaattgtcattacttcaggtgatggcacaacaagtcctatttctgaacatgactaccagattggtggttatactgaaaaatgggaatctggagtaaaagactgtgttgtattacacagttacttcacttcagactattaccagctgtactcaactcaattgagtacagacactggtgttgaacatgttaccttcttcatctacaataaaattgttgatgagcctgaagaacatgtccaaattcacacaatcgacggttcatccggagttgttaatccagtaatggaaccaatttatgatgaaccgacgacgactactagcgtgcctttgtaagcacaagctgatgagtacgaacttatgtactcattcgtttcggaagagacaggtacgttaatagttaatagcgtacttctttttcttgctttcgtggtattcttgctagttacactagccatccttactgcgcttcgattgtgtgcgtactgctgcaatattgttaacgtgagtcttgtaaaaccttctttttacgtttactctcgtgttaaaaatctgaattcttctagagttcctgatcttctggtctaaacgaactaaatattatattagtttttctgtttggaactttaattttagccatggcagattccaacggtactattaccgttgaagagcttaaaaagctccttgaacaatggaacctagtaataggtttcctattccttacatggatttgtcttctacaatttgcctatgccaacaggaataggtttttgtatataattaagttaattttcctctggctgttatggccagtaactttagcttgttttgtgcttgctgctgtttacagaataaattggatcaccggtggaattgctatcgcaatggcttgtcttgtaggcttgatgtggctcagctacttcattgcttctttcagactgtttgcgcgtacgcgttccatgtggtcattcaatccagaaactaacattcttctcaacgtgccactccatggcactattctgaccagaccgcttctagaaagtgaactcgtaatcggagctgtgatccttcgtggacatcttcgtattgctggacaccatctaggacgctgtgacatcaaggacctgcctaaagaaatcactgttgctacatcacgaacgctttcttattacaaattgggagcttcgcagcgtgtagcaggtgactcaggttttgctgcatacagtcgctacaggattggcaactataaattaaacacagaccattccagtagcagtgacaatattgctttgcttgtacagtaagtgacaacagatgtttcatctcgttgactttcaggttactatagcagagatattactaattattatgaggacttttaaagtttccatttggaatcttgattacatcataaacctcataattaaaaatttatctaagtcactaactgagaataaatattctcaattagatgaagagcaaccaatggagattgattaaacgaacatgaaaattattcttttcttggcactgataacactcgctacttgtgagctttatcactaccaagagtgtgttagaggtacaacagtacttttaaaagaaccttgctcttctggaacatacgagggcaattcaccatttcatcctctagctgataacaaatttgcactgacttgctttagcactcaatttgcttttgcttgtcctgacggcgtaaaacacgtctatcagttacgtgccagatcagtttcacctaaactgttcatcagacaagaggaagttcaagaactttactctccaatttttcttattgttgcggcaatagtgtttataacactttgcttcacactcaaaagaaagacagaatgattgaactttcattaattgacttctatttgtgctttttagcctttctgctattccttgttttaattatgcttattatcttttggttctcacttgaactgcaagatcataatgaaacttgtcacgcctaaacgaacatgaaatttcttgttttcttaggaatcatcacaactgtagctgcatttcaccaagaatgtagtttacagtcatgtactcaacatcaaccatatgtagttgatgacccgtgtcctattcacttctattctaaatggtatattagagtaggagctagaaaatcagcacctttaattgaattgtgcgtggatgaggctggttctaaatcacccattcagtacatcgatatcggtaattatacagtttcctgtttaccttttacaattaattgccaggaacctaaattgggtagtcttgtagtgcgttgttcgttctatgaagactttttagagtatcatgacgttcgtgttgttttagatttcatctaaacgaacaaactaaaatgtctgataatggaccccaaaatcagcgaaatgcaccccgcattacgtttggtggaccctcagattcaactggcagtaaccagaatggagaacgcagtggggcgcgatcaaaacaacgtcggccccaaggtttacccaataatactgcgtcttggttcaccgctctcactcaacatggcaaggaagaccttaaattccctcgaggacaaggcgttccaattaacaccaatagcagtccagatgaccaaattggctactaccgaagagctaccagacgaattcgtggtggtgacggtaaaatgaaagatctcagtccaagatggtatttctactacctaggaactgggccagaagctggacttccctatggtgctaacaaagacggcatcatatgggttgcaactgagggagccttgaatacaccaaaagatcacattggcacccgcaatcctgctaacaatgctgcaatcgtgctacaacttcctcaaggaacaacattgccaaaaggcttctacgcagaagggagcagaggcggcagtcaagcctcttctcgttcctcatcacgtagtcgcaacagttcaagaaattcaactccaggcagcagtaggggaacttctcctgctagaatggctggcaatggcggtgatgctgctcttgctttgctgctgcttgacagattgaaccagcttgagagcaaaatgtctggtaaaggccaacaacaacaaggccaaactgtcactaagaaatctgctgctgaggcttctaagaagcctcggcaaaaacgtactgccactaaagcatacaatgtaacacaagctttcggcagacgtggtccagaacaaacccaaggaaattttggggaccaggaactaatcagacaaggaactgattacaaacattggccgcaaattgcacaatttgcccccagcgcttcagcgttcttcggaatgtcgcgcattggcatggaagtcacaccttcgggaacgtggttgacctacacaggtgccatcaaattggatgacaaagatccaaatttcaaagatcaagtcattttgctgaataagcatattgacgcatacaaaacattcccaccaacagagcctaaaaaggacaaaaagaagaaggctgatgaaactcaagccttaccgcagagacagaagaaacagcaaactgtgactcttcttcctgctgcagatttggatgatttctccaaacaattgcaacaatccatgagcagtgctgactcaactcaggcctaaactcatgcagaccacacaaggcagatgggctatataaacgttttcgcttttccgtttacgatatatagtctactcttgtgcagaatgaattctcgtaactacatagcacaagtagatgtagttaactttaatctcacatagcaatctttaatcagtgtgtaacattagggaggacttgaaagagccaccacattttcaccgaggccacgcggagtacgatcgagtgtacagtgaacaatgctagggagagctgcctatatggaagagccctaatgtgtaaaattaattttagtagtgctatccccatgtgattttaatagcttcttaggagaatgacaaaaaaaaaaaaaaaaaaaaaaaaaaaaaaaaa

SEQ ID NO: 77 - DNA, 7912 bp, Venezuelan equine encephalitis virus
  source 1..7912: mol_type = other DNA
taatacgactcactataatgggcggcgcatgagagaagcccagaccaattacctacccaaaatggagaaagttcacgttgacatcgaggaagacagcccattcctcagagctttgcagcggagcttcccgcagtttgaggtagaagccaagcaggtcactgataatgaccatgctaatgccagagcgttttcgcatctggcttcaaaactgatcgaaacggaggtggacccatccgacacgatccttgacattggaagtgcgcccgcccgcagaatgtattctaagcacaagtatcattgtatctgtccgatgagatgtgcggaagatccggacagattgtataagtatgcaactaagctgaagaaaaactgtaaggaaataactgataaggaattggacaagaaaatgaaggagctcgccgccgtcatgagcgaccctgacctggaaactgagactatgtgcctccacgacgacgagtcgtgtcgctacgaagggcaagtcgctgtttaccaggatgtatacgcggttgacggaccgacaagtctctatcaccaagccaataagggagttagagtcgcctactggataggctttgacaccaccccttttatgtttaagaacttggctggagcatatccatcatactctaccaactgggccgacgaaaccgtgttaacggctcgtaacataggcctatgcagctctgacgttatggagcggtcacgtagagggatgtccattcttagaaagaagtatttgaaaccatccaacaatgttctattctctgttggctcgaccatctaccacgagaagagggacttactgaggagctggcacctgccgtctgtatttcacttacgtggcaagcaaaattacacatgtcggtgtgagactatagttagttgcgacgggtacgtcgttaaaagaatagctatcagtccaggcctgtatgggaagccttcaggctatgctgctacgatgcaccgcgagggattcttgtgctgcaaagtgacagacacattgaacggggagagggtctcttttcccgtgtgcacgtatgtgccagctacattgtgtgaccaaatgactggcatactggcaacagatgtcagtgcggacgacgcgcaaaaactgctggttgggctcaaccagcgtatagtcgtcaacggtcgcacccagagaaacaccaataccatgaaaaattaccttttgcccgtagtggcccaggcatttgctaggtgggcaaaggaatataaggaagatcaagaagatgaaaggccactaggactacgagatagacagttagtcatggggtgttgttgggcttttagaaggcacaagataacatctatttataagcgcccggatacccaaaccatcatcaaagtgaacagcgatttccactcattcgtgctgcccaggataggcagtaacacattggagatcgggctgagaacaagaatcaggaaaatgttagaggagcacaaggagccgtcacctctcattaccgccgaggacgtacaagaagctaagtgcgcagccgatgaggctaaggaggtgcgtgaagccgaggagttgcgcgcagctctaccacctttggcagctgatgttgaggagcccactctggaagccgatgtcgacttgatgttacaagaggctggggccggctcagtggagacacctcgtggcttgataaaggttaccagctacgctggcgaggacaagatcggctcttacgctgtgctttctccgcaggctgtactcaagagtgaaaaattatcttgcatccaccctctcgctgaacaagtcatagtgataacacactctggccgaaaagggcgttatgccgtggaaccataccatggtaaagtagtggtgccagagggacatgcaatacccgtccaggactttcaagctctgagtgaaagtgccaccattgtgtacaacgaacgtgagttcgtaaacaggtacctgcaccatattgccacacatggaggagcgctgaacactgatgaagaatattacaaaactgtcaagcccagcgagcacgacggcgaatacctgtacgacatcgacaggaaacagtgcgtcaagaaagaactagtcactgggctagggctcacaggcgagctggtggatcctcccttccatgaattcgcctacgagagtctgagaacacgaccagccgctccttaccaagtaccaaccataggggtgtatggcgtgccaggatcaggcaagtctggcatcattaaaagcgcagtcaccaaaaaagatctagtggtgagcgccaagaaagaaaactgtgcagaaattataagggacgtcaagaaaatgaaagggctggacgtcaatgccagaactgtggactcagtgctcttgaatggatgcaaacaccccgtagagaccctgtatattgacgaagcttttgcttgtcatgcaggtactctcagagcgctcatagccattataagacctaaaaaggcagtgctctgcggggatcccaaacagtgcggtttttttaacatgatgtgcctgaaagtgcattttaaccacgagatttgcacacaagtcttccacaaaagcatctctcgccgttgcactaaatctgtgacttcggtcgtctcaaccttgttttacgacaaaaaaatgagaacgacgaatccgaaagagactaagattgtgattgacactaccggcagtaccaaacctaagcaggacgatctcattctcacttgtttcagagggtgggtgaagcagttgcaaatagattacaaaggcaacgaaataatgacggcagctgcctctcaagggctgacccgtaaaggtgtgtatgccgttcggtacaaggtgaatgaaaatcctctgtacgcacccacctcagaacatgtgaacgtcctactgacccgcacggaggaccgcatcgtgtggaaaacactagccggcgacccatggataaaaacactgactgccaagtaccctgggaatttcactgccacgatagaggagtggcaagcagagcatgatgccatcatgaggcacatcttggagagaccggaccctaccgacgtcttccagaataaggcaaacgtgtgttgggccaaggctttagtgccggtgctgaagaccgctggcatagacatgaccactgaacaatggaacactgtggattattttgaaacggacaaagctcactcagcagagatagtattgaaccaactatgcgtgaggttctttggactcgatctggactccggtctattttctgcacccactgttccgttatccattaggaataatcactgggataactccccgtcgcctaacatgtacgggctgaataaagaagtggtccgtcagctctctcgcaggtacccacaactgcctcgggcagttgccactggaagagtctatgacatgaacactggtacactgcgcaattatgatccgcgcataaacctagtacctgtaaacagaagactgcctcatgctttagtcctccaccataatgaacacccacagagtgacttttcttcattcgtcagcaaattgaagggcagaactgtcctggtggtcggggaaaagttgtccgtcccaggcaaaatggttgactggttgtcagaccggcctgaggctaccttcagagctcggctggatttaggcatcccaggtgatgtgcccaaatatgacataatatttgttaatgtgaggaccccatataaataccatcactatcagcagtgtgaagaccatgccattaagcttagcatgttgaccaagaaagcttgtctgcatctgaatcccggcggaacctgtgtcagcataggttatggttacgctgacagggccagcgaaagcatcattggtgctatagcgcggcagttcaagttttcccgggtatgcaaaccgaaatcctcacttgaagagacggaagttctgtttgtattcattgggtacgatcgcaaggcccgtacgcacaatccttacaagctttcatcaaccttgaccaacatttatacaggttccagactccacgaagccggatgtgcaccctcatatcatgtggtgcgaggggatattgccacggccaccgaaggagtgattataaatgctgctaacagcaaaggacaacctggcggaggggtgtgcggagcgctgtataagaaattcccggaaagcttcgatttacagccgatcgaagtaggaaaagcgcgactggtcaaaggtgcagctaaacatatcattcatgccgtaggaccaaacttcaacaaagtttcggaggttgaaggtgacaaacagttggcagaggcttatgagtccatcgctaagattgtcaacgataacaattacaagtcagtagcgattccactgttgtccaccggcatcttttccgggaacaaagatcgactaacccaatcattgaaccatttgctgacagctttagacaccactgatgcagatgtagccatatactgcagggacaagaaatgggaaatgactctcaaggaagcagtggctaggagagaagcagtggaggagatatgcatatccgacgactcttcagtgacagaacctgatgcagagctggtgagggtgcatccgaagagttctttggctggaaggaagggctacagcacaagcgatggcaaaactttctcatatttggaagggaccaagtttcaccaggcggccaaggatatagcagaaattaatgccatgtggcccgttgcaacggaggccaatgagcaggtatgcatgtatatcctcggagaaagcatgagcagtattaggtcgaaatgccccgtcgaagagtcggaagcctccacaccacctagcacgctgccttgcttgtgcatccatgccatgactccagaaagagtacagcgcctaaaagcctcacgtccagaacaaattactgtgtgctcatcctttccattgccgaagtatagaatcactggtgtgcagaagatccaatgctcccagcctatattgttctcaccgaaagtgcctgcgtatattcatccaaggaagtatctcgtggaaacaccaccggtagacgagactccggagccatcggcagagaaccaatccacagaggggacacctgaacaaccaccacttataaccgaggatgagaccaggactagaacgcctgagccgatcatcatcgaagaggaagaagaggatagcataagtttgctgtcagatggcccgacccaccaggtgctgcaagtcgaggcagacattcacgggccgccctctgtatctagctcatcctggtccattcctcatgcatccgactttgatgtggacagtttatccatacttgacaccctggagggagctagcgtgaccagcggggcaacgtcagccgagactaactcttacttcgcaaagagtatggagtttctggcgcgaccggtgcctgcgcctcgaacagtattcaggaaccctccacatcccgctccgcgcacaagaacaccgtcacttgcacccagcagggcctgctcgagaaccagcctagtttccaccccgccaggcgtgaatagggtgatcactagagaggagctcgaggcgcttaccccgtcacgcactcctagcaggtcggtctcgagaaccagcctggtctccaacccgccaggcgtaaatagggtgattacaagagaggagtttgaggcgttcgtagcacaacaacaatgacggtttgatgcgggtgcatacatcttttcctccgacaccggtcaagggcatttacaacaaaaatcagtaaggcaaacggtgctatccgaagtggtgttggagaggaccgaattggagatttcgtatgccccgcgcctcgaccaagaaaaagaagaattactacgcaagaaattacagttaaatcccacacctgctaacagaagcagataccagtccaggaaggtggagaacatgaaagccataacagctagacgtattctgcaaggcctagggcattatttgaaggcagaaggaaaagtggagtgctaccgaaccctgcatcctgttcctttgtattcatctagtgtgaaccgtgccttttcaagccccaaggtcgcagtggaagcctgtaacgccatgttgaaagagaactttccgactgtggcttcttactgtattattccagagtacgatgcctatttggacatggttgacggagcttcatgctgcttagacactgccagtttttgccctgcaaagctgcgcagctttccaaagaaacactcctatttggaacccacaatacgatcggcagtgccttcagcgatccagaacacgctccagaacgtcctggcagctgccacaaaaagaaattgcaatgtcacgcaaatgagagaattgcccgtattggattcggcggcctttaatgtggaatgcttcaagaaatatgcgtgtaataatgaatattgggaaacgtttaaagaaaaccccatcaggcttactgaagaaaacgtggtaaattacattaccaaattaaaaggaccaaaagctgctgctctttttgcgaagacacataatttgaatatgttgcaggacataccaatggacaggtttgtaatggacttaaagagagacgtgaaagtgactccaggaacaaaacatactgaagaacggcccaaggtacaggtgatccaggctgccgatccgctagcaacagcgtatctgtgcggaatccaccgagagctggttaggagattaaatgcggtcctgcttccgaacattcatacactgtttgatatgtcggctgaagactttgacgctattatagccgagcacttccagcctggggattgtgttctggaaactgacatcgcgtcgtttgataaaagtgaggacgacgccatggctctgaccgcgttaatgattctggaagacttaggtgtggacgcagagctgttgacgctgattgaggcggctttcggcgaaatttcatcaatacatttgcccactaaaactaaatttaaattcggagccatgatgaaatctggaatgttcctcacactgtttgtgaacacagtcattaacattgtaatcgcaagcagagtgttgagagaacggctaaccggatcaccatgtgcagcattcattggagatgacaatatcgtgaaaggagtcaaatcggacaaattaatggcagacaggtgcgccacctggttgaatatggaagtcaagattatagatgctgtggtgggcgagaaagcgccttatttctgtggagggtttattttgtgtgactccgtgaccggcacagcgtgccgtgtggcagaccccctaaaaaggctgtttaagcttggcaaacctctggcagcagacgatgaacatgatgatgacaggagaagggcattgcatgaagagtcaacacgctggaaccgagtgggtattctttcagagctgtgcaaggcagtagaatcaaggtatgaaaccgtaggaacttccatcatagttatggccatgactactctagctagcagtgttaaatcattcagctacctgagaggggcccctataactctctacggctaacctgaatggactacgacgtatcacgcccaaacatttacagccgcggtgtcaaaaaccgcgtggacgtggttaacatccctgctgggaggatcagccgtaattattataattggcttggtgctggctactattgtggccatgtacgtgctgaccaaccagaaacataattgaatacagcagcaattggcaagctgcttacatagaactcgcggcgattggcatgccgccttaaaatttttattttattttttcttttcttttccgaatcggattttgtttttaatatttcaaaaaaaaaaaaaaaaaaaaaaaaaaaaaaaaaaaaaaaaaaaaaaaaaaaaaaaaaaaaaaaaaaaaaaaaaaaaaaaa

SEQ ID NO: 78 - RNA, 3822 nt, Severe acute respiratory syndrome-related coronavirus
  source 1..3822: mol_type = other RNA
atgtttgtttttcttgttttattgccactagtctctagtcagtgtgttaatcttacaaccagaactcaattaccccctgcatacactaattctttcacacgtggtgtttattaccctgacaaagttttcagatcctcagttttacattcaactcaggacttgttcttacctttcttttccaatgttacttggttccatgctatacatgtctctgggaccaatggtactaagaggtttgataaccctgtcctaccatttaatgatggtgtttattttgcttccactgagaagtctaacataataagaggctggatttttggtactactttagattcgaagacccagtccctacttattgttaataacgctactaatgttgttattaaagtctgtgaatttcaattttgtaatgatccatttttgggtgtttattaccacaaaaacaacaaaagttggatggaaagtgagttcagagtttattctagtgcgaataattgcacttttgaatatgtctctcagccttttcttatggaccttgaaggaaaacagggtaatttcaaaaatcttagggaatttgtgtttaagaatattgatggttattttaaaatatattctaagcacacgcctattaatttagtgcgtgatctccctcagggtttttcggctttagaaccattggtagatttgccaataggtattaacatcactaggtttcaaactttacttgctttacatagaagttatttgactcctggtgattcttcttcaggttggacagctggtgctgcagcttattatgtgggttatcttcaacctaggacttttctattaaaatataatgaaaatggaaccattacagatgctgtagactgtgcacttgaccctctctcagaaacaaagtgtacgttgaaatccttcactgtagaaaaaggaatctatcaaacttctaactttagagtccaaccaacagaatctattgttagatttcctaatattacaaacttgtgcccttttggtgaagtttttaacgccaccagatttgcatctgtttatgcttggaacaggaagagaatcagcaactgtgttgctgattattctgtcctatataattccgcatcattttccacttttaagtgttatggagtgtctcctactaaattaaatgatctctgctttactaatgtctatgcagattcatttgtaattagaggtgatgaagtcagacaaatcgctccagggcaaactggaaagattgctgattataattataaattaccagatgattttacaggctgcgttatagcttggaattctaacaatcttgattctaaggttggtggtaattataattacctgtatagattgtttaggaagtctaatctcaaaccttttgagagagatatttcaactgaaatctatcaggccggtagcacaccttgtaatggtgttgaaggttttaattgttactttcctttacaatcatatggtttccaacccactaatggtgttggttaccaaccatacagagtagtagtactttcttttgaacttctacatgcaccagcaactgtttgtggacctaaaaagtctactaatttggttaaaaacaaatgtgtcaatttcaacttcaatggtttaacaggcacaggtgttcttactgagtctaacaaaaagtttctgcctttccaacaatttggcagagacattgctgacactactgatgctgtccgtgatccacagacacttgagattcttgacattacaccatgttcttttggtggtgtcagtgttataacaccaggaacaaatacttctaaccaggttgctgttctttatcaggatgttaactgcacagaagtccctgttgctattcatgcagatcaacttactcctacttggcgtgtttattctacaggttctaatgtttttcaaacacgtgcaggctgtttaataggggctgaacatgtcaacaactcatatgagtgtgacatacccattggtgcaggtatatgcgctagttatcagactcagactaattctcctcggcgggcacgtagtgtagctagtcaatccatcattgcctacactatgtcacttggtgcagaaaattcagttgcttactctaataactctattgccatacccacaaattttactattagtgttaccacagaaattctaccagtgtctatgaccaagacatcagtagattgtacaatgtacatttgtggtgattcaactgaatgcagcaatcttttgttgcaatatggcagtttttgtacacaattaaaccgtgctttaactggaatagctgttgaacaagacaaaaacacccaagaagtttttgcacaagtcaaacaaatttacaaaacaccaccaattaaagattttggtggttttaatttttcacaaatattaccagatccatcaaaaccaagcaagaggtcatttattgaagatctacttttcaacaaagtgacacttgcagatgctggcttcatcaaacaatatggtgattgccttggtgatattgctgctagagacctcatttgtgcacaaaagtttaacggccttactgttttgccacctttgctcacagatgaaatgattgctcaatacacttctgcactgttagcgggtacaatcacttctggttggacctttggtgcaggtgctgcattacaaataccatttgctatgcaaatggcttataggtttaatggtattggagttacacagaatgttctctatgagaaccaaaaattgattgccaaccaatttaatagtgctattggcaaaattcaagactcactttcttccacagcaagtgcacttggaaaacttcaagatgtggtcaaccaaaatgcacaagctttaaacacgcttgttaaacaacttagctccaattttggtgcaatttcaagtgttttaaatgatatcctttcacgtcttgacaaagttgaggctgaagtgcaaattgataggttgatcacaggcagacttcaaagtttgcagacatatgtgactcaacaattaattagagctgcagaaatcagagcttctgctaatcttgctgctactaaaatgtcagagtgtgtacttggacaatcaaaaagagttgatttttgtggaaagggctatcatcttatgtccttccctcagtcagcacctcatggtgtagtcttcttgcatgtgacttatgtccctgcacaagaaaagaacttcacaactgctcctgccatttgtcatgatggaaaagcacactttcctcgtgaaggtgtctttgtttcaaatggcacacactggtttgtaacacaaaggaatttttatgaaccacaaatcattactacagacaacacatttgtgtctggtaactgtgatgttgtaataggaattgtcaacaacacagtttatgatcctttgcaacctgaattagactcattcaaggaggagttagataaatattttaagaatcatacatcaccagatgttgatttaggtgacatctctggcattaatgcttcagttgtaaacattcaaaaagaaattgaccgcctcaatgaggttgccaagaatttaaatgaatctctcatcgatctccaagaacttggaaagtatgagcagtatataaaatggccatggtacatttggctaggttttatagctggcttgattgccatagtaatggtgacaattatgctttgctgtatgaccagttgctgtagttgtctcaagggctgttgttcttgtggatcctgctgcaaatttgatgaagacgactctgagccagtgctcaaaggagtcaaattacattacacataa

SEQ ID NO: 79 - DNA, 3822 bp, Severe acute respiratory syndrome-related coronavirus
  source 1..3822: mol_type = other DNA
atgtttgtcttcctggtcttgctgccgctggtgagcagccagtgcgtgaatctcaccacccgcacccagcttccacctgcctacactaacagcttcacccgaggggtgtattaccctgacaaggtattccggtcctccgtcctccatagcacgcaggacctttttctgcccttcttctcaaatgtgacatggttccatgccattcacgtgagcggcacgaatggaacgaagcgctttgataaccccgtgctgcctttcaatgacggcgtctacttcgcctccactgaaaagtcaaacatcatccggggctggatctttggcaccactcttgattcaaagacccagtcactgctgattgtgaacaatgctacaaacgtggttatcaaggtgtgtgagtttcagttctgtaacgatccatttttgggagtgtactaccacaagaacaacaagtcctggatggagtctgagttcagagtgtatagctctgctaacaactgcaccttcgagtacgtgtcccagcctttccttatggacctggaaggcaaacagggcaatttcaaaaacctgagagagttcgtgtttaagaacattgacggatacttcaaaatttattctaagcacacaccaattaacttagtgcgggacctaccccaaggctttagcgccctagagcccctggttgacctgcccattgggatcaatataacaaggttccaaactctactggctctgcatagaagttatctgaccccaggagacagctctagtggttggaccgccggcgcagcagcctactatgtcgggtacttacagccacgcacgttccttctgaagtacaatgagaacgggacaatcactgacgcagtagactgtgcactggacccgctaagcgagactaagtgcacacttaaatccttcacggtggagaaaggcatttatcagacctctaacttcagggtgcagccaacagaaagcattgtgcgattcccaaatattactaatctttgccctttcggggaggtctttaatgcaactagattcgcatcagtctatgcgtggaaccgcaaacgcatttccaattgtgtcgcagactactcagtgctgtacaactctgcctctttcagtacgttcaagtgttacggagtgtcacccactaaactgaacgacctgtgctttacaaatgtctacgctgactccttcgtgattaggggagacgaggtgagacaaattgcccccggacagactgggaagattgccgactacaattataagcttcctgatgatttcactggctgtgttattgcctggaatagtaacaatctggatagcaaggtgggaggcaactataactacttatatcgactgtttaggaagagtaatctgaaaccatttgagcgggatatttccacagaaatttaccaggccgggagcacaccatgtaatggggtggagggatttaattgttacttcccactccagagctatggtttccaacccaccaatggagtgggttaccagccctatagagtcgtggtgcttagttttgagctgcttcacgccccagcaaccgtctgcggtcccaaaaagtcgaccaatctcgtgaaaaacaaatgcgtaaacttcaactttaacggcttaacaggaaccggcgtgctcaccgaaagcaacaagaaattccttccatttcagcaattcggaagggacatcgccgacacaacagacgcggtgagggacccacagactctggagatactggacatcactccttgttcgtttgggggcgtctcggtcatcacacccgggactaatactagtaatcaggtagcagttttatatcaaggcgtcaactgtaccgaagtacctgtggccatacacgctgatcagctaacgccaacatggcgagtctattccaccggctctaacgtttttcagaccagggctgggtgcctgataggggcagagcacgtcaataattcctatgagtgtgatatccccataggtgcggggatctgtgccagctatcaaacccaaaccaattcaccaaggcgagcacggtctgtggcttctcagagcataattgcatatacaatgtcactgggcgctgagaatagcgttgcatactctaataacagcatagccattcccacgaactttactatcagtgtgacaaccgaaatattgccagtttcgatgaccaaaactagcgtggattgcacgatgtacatctgtggagactctaccgaatgcagcaatctgctattacaatatggcagcttctgtacacagttaaatcgagccttgacaggcatcgcagtggaacaggacaaaaatactcaagaggtgtttgcacaggtgaagcaaatctacaaaacgccccccattaaagattttggcgggttcaatttttcacaaattctccccgacccgtctaagccgagtaagcggtccttcatcgaagatctgctctttaacaaagtaaccctcgccgatgccggctttattaagcagtatggcgactgcctgggggatatagccgctcgtgacctgatttgcgcccagaagttcaatggtctgaccgtgttgcctcctttattgaccgatgaaatgattgcccagtacactagtgccctgctggccggcactatcacgtctgggtggaccttcggagctggtgccgccttgcagataccttttgcaatgcagatggcctataggtttaatggtatcggagtgactcagaacgtactgtacgagaaccagaagctcatcgctaatcaatttaactccgctatcggaaaaatccaggacagcctctcttctacagctagcgctctgggcaaactgcaggatgtcgttaatcagaatgcccaggccctgaacaccttggttaaacaactatcttccaacttcggggccatatccagtgtgttgaatgatattctctcccgcttggataaggtggaagctgaggtgcagatcgatcgcttgatcaccggcagactgcagtccctccagacatatgtaactcagcagctgattagagccgccgagataagggcaagtgcgaatctggctgccaccaagatgagcgaatgtgtattgggccagagcaaacgagttgatttttgcggtaaggggtatcatttaatgtctttccctcaatccgcacctcatggcgtagttttcctgcatgtgacttatgtcccggctcaggagaagaattttaccacagcccccgcgatctgccatgacggaaaggcccacttcccccgggaaggcgtgtttgtatccaatgggactcactggtttgtcactcagcgaaatttttatgaaccacagatcatcaccactgacaacacatttgttagtggaaactgcgatgtggtcatcggcatcgtgaataacactgtctatgatccactgcaacctgaactggattcttttaaagaggaactcgacaagtattttaaaaaccacactagccctgacgtggatctcggtgacatttctggcatcaacgctagcgtagtgaacattcagaaagagatagatagacttaatgaggtggccaagaacctcaacgaaagtctgatcgacctccaggaactggggaaatacgagcagtacattaaatggccttggtacatatggctggggttcattgctgggctgatcgcaatagtgatggtgaccataatgctctgttgcatgactagctgctgcagctgcctgaagggctgctgtagttgtgggtcatgttgtaagtttgacgaagatgatagcgagcctgtccttaaaggagtgaagctccactacacctag

SEQ ID NO: 80-84 - skipped (5 entries)

SEQ ID NO: 85 - DNA, 3822 bp, Severe acute respiratory syndrome-related coronavirus
  source 1..3822: mol_type = other DNA
atgtttgtcttcctggtcttgctgccgctcgtgtctagccagtgcgtgaatctcaccacccgcacccagcttccacctgcctacactaacagcttcacccgaggggtgtattaccctgacaaggtattccggtcctccgtcctccatagcacgcaggacctttttctgcccttcttctcaaatgtgacatggttccatgccattcacgtgagcggcacgaatggaacgaagcgctttgataaccccgtgctgcctttcaatgacggcgtctacttcgcctccactgaaaagtcaaacatcatccggggctggatctttggcaccactcttgattcaaagacccagtcactgctgattgtgaacaatgctacaaacgtggttatcaaagtctgcgagtttcagttctgtaacgatccatttttgggagtgtactaccacaagaacaacaagtcctggatggagtctgagttcagagtgtatagctctgctaacaactgcaccttcgagtacgtgtcccagcctttccttatggacctggaaggcaaacagggcaatttcaaaaacctgagagagttcgtgtttaagaacattgacggatacttcaaaatttattctaagcacacaccaattaacttagtgcgggacctaccccaaggctttagcgccctagagcccctggttgacctgcccattgggatcaatataacaaggttccaaactctactggctctgcatagaagttatctgaccccaggagacagctctagtggttggaccgccggcgcagcagcctactatgtcgggtacttacagccacgcacgttccttctgaagtacaatgagaacgggacaatcactgacgcagtagactgtgcactggacccgctaagcgagactaagtgcacacttaaatccttcacggtggagaaaggcatttatcagacctctaacttcagggtgcagccaacagaaagcattgtgcgattcccaaatattactaatctttgccctttcggggaggtctttaatgcaactagattcgcatcagtctatgcgtggaaccgcaaacgcatttccaattgtgtcgcagactactcagtgctgtacaactctgcctctttcagtacgttcaagtgttacggagtgtcacccactaaactgaacgacctgtgctttacaaatgtctacgctgactccttcgtgattaggggagacgaggtgagacaaattgcccccggacagactgggaagattgccgactacaattataagcttcctgatgatttcactggctgtgttattgcctggaatagtaacaatctggatagcaaggtgggaggcaactataactacttatatcgactgtttaggaagagtaatctgaaaccatttgagcgggatatttccacagaaatttaccaggccgggagcacaccatgtaatggggtggagggatttaattgttacttcccactccagagctatggtttccaacccaccaatggagtgggttaccagccctatagagtcgtggtgcttagttttgagctgcttcacgccccagcaaccgtctgcggtcccaaaaagtcgaccaatctcgtgaaaaacaaatgcgtaaacttcaactttaacggcttaacaggaaccggcgtgctcaccgaaagcaacaagaaattccttccatttcagcaattcggaagggacatcgccgacacaacagacgccgtcagggacccacagactctggagatactggacatcactccttgttcgtttgggggcgtctcggtcatcacacccgggactaatactagtaatcaggtagcagttttatatcaaggcgtcaactgtaccgaagtacctgtggccatacacgctgatcagctaacgccaacatggcgagtctattccaccggctctaacgtttttcagaccagggctgggtgcctgataggggcagagcacgtcaataattcctatgagtgtgatatccccataggtgcggggatctgtgccagctatcaaacccaaaccaattcaccaaggcgagcacggtctgtggcttctcagagcataattgcatatacaatgtcactgggcgctgagaatagcgttgcatactctaataacagcatagccattcccacgaactttactatcagtgtgacaaccgaaatattgccagtttcgatgaccaaaactagcgtggattgcacgatgtacatctgtggagactctaccgaatgcagcaatctgctattacaatatggcagcttctgtacacagttaaatcgagccttgacaggcatcgcagtggaacaggacaaaaatactcaagaggtgtttgcacaggtgaagcaaatctacaaaacgccccccattaaagattttggcgggttcaatttttcacaaattctccccgacccgtctaagccgagtaagcggtccttcatcgaagatctgctctttaacaaagtaaccctcgccgatgccggctttattaagcagtatggcgactgcctgggggatatagccgctcgtgacctgatttgcgcccagaagttcaatggtctgaccgtgttgcctcctttattgaccgatgaaatgattgcccagtacactagtgccctgctggccggcactatcacgtctgggtggaccttcggagctggtgccgccttgcagataccttttgcaatgcagatggcctataggtttaatggtatcggagtgactcagaacgtactgtacgagaaccagaagctcatcgctaatcaatttaactccgctatcggaaaaatccaggacagcctctcttctacagctagcgctctgggcaaactgcaggatgtcgttaatcagaatgcccaggccctgaacaccttggttaaacaactatcttccaacttcggggccatatccagtgtgttgaatgatattctctcccgcttggataaggtggaagctgaggtgcagatcgatcgcttgatcaccggcagactgcagtccctccagacatatgtaactcagcagctgattagagccgccgagataagggcaagtgcgaatctggctgccaccaagatgagcgaatgtgtattgggccagagcaaacgagttgatttttgcggtaaggggtatcatttaatgtctttccctcaatccgcacctcatggcgtagttttcctgcatgtgacttatgtcccggctcaggagaagaattttaccacagcccccgcgatctgccatgacggaaaggcccacttcccccgggaaggcgtgtttgtatccaatgggactcactggtttgtcactcagcgaaatttttatgaaccacagatcatcaccactgacaacacatttgttagtggaaactgcgatgtggtcatcggcatcgtgaataacactgtctatgatccactgcaacctgaactggattcttttaaagaggaactcgacaagtattttaaaaaccacactagccctgacgtggatctcggtgacatttctggcatcaacgctagcgtagtgaacattcagaaagagatagatagacttaatgaggtggccaagaacctcaacgaaagtctgatcgacctccaggaactggggaaatacgagcagtacattaaatggccttggtacatatggctggggttcattgctgggctgatcgcaatagtgatggtgaccataatgctctgttgcatgactagctgctgcagctgcctgaagggctgctgtagttgtgggtcatgttgtaagtttgacgaagatgatagcgagcctgtccttaaaggagtgaagctccactacacctag

SEQ ID NO: 86-88 - skipped (3 entries)

SEQ ID NO: 89 - DNA, 3822 bp, synthetic construct
  source 1..3822: mol_type = other DNA
atgtttgtcttcctggtcttgctgccgctggtgagcagccagtgcgtgaatctcaccacccgcacccagcttccacctgcctacactaacagcttcacccgaggggtgtattaccctgacaaggtattccggtcctccgtcctccatagcacgcaggacctttttctgcccttcttctcaaatgtgacatggttccatgccattcacgtgagcggcacgaatggaacgaagcgctttgataaccccgtgctgcctttcaatgacggcgtctacttcgcctccactgaaaagtcaaacatcatccggggctggatctttggcaccactcttgattcaaagacccagtcactgctgattgtgaacaatgctacaaacgtggttatcaaggtgtgtgagtttcagttctgtaacgatccatttttgggagtgtactaccacaagaacaacaagtcctggatggagtctgagttcagagtgtatagctctgctaacaactgcaccttcgagtacgtgtcccagcctttccttatggacctggaaggcaaacagggcaatttcaaaaacctgagagagttcgtgtttaagaacattgacggatacttcaaaatttattctaagcacacaccaattaacttagtgcgggacctaccccaaggctttagcgccctagagcccctggttgacctgcccattgggatcaatataacaaggttccaaactctactggctctgcatagaagttatctgaccccaggagacagctctagtggttggaccgccggcgcagcagcctactatgtcgggtacttacagccacgcacgttccttctgaagtacaatgagaacgggacaatcactgacgcagtagactgtgcactggacccgctaagcgagactaagtgcacacttaaatccttcacggtggagaaaggcatttatcagacctctaacttcagggtgcagccaacagaaagcattgtgcgattcccaaatattactaatctttgccctttcggggaggtctttaatgcaactagattcgcatcagtctatgcgtggaaccgcaaacgcatttccaattgtgtcgcagactactcagtgctgtacaactctgcctctttcagtacgttcaagtgttacggagtgtcacccactaaactgaacgacctgtgctttacaaatgtctacgctgactccttcgtgattaggggagacgaggtgagacaaattgcccccggacagactgggaagattgccgactacaattataagcttcctgatgatttcactggctgtgttattgcctggaatagtaacaatctggatagcaaggtgggaggcaactataactacttatatcgactgtttaggaagagtaatctgaaaccatttgagcgggatatttccacagaaatttaccaggccgggagcacaccatgtaatggggtggagggatttaattgttacttcccactccagagctatggtttccaacccaccaatggagtgggttaccagccctatagagtcgtggtgcttagttttgagctgcttcacgccccagcaaccgtctgcggtcccaaaaagtcgaccaatctcgtgaaaaacaaatgcgtaaacttcaactttaacggcttaacaggaaccggcgtgctcaccgaaagcaacaagaaattccttccatttcagcaattcggaagggacatcgccgacacaacagacgcggtgagggacccacagactctggagatactggacatcactccttgttcgtttgggggcgtctcggtcatcacacccgggactaatactagtaatcaggtagcagttttatatcaaggcgtcaactgtaccgaagtacctgtggccatacacgctgatcagctaacgccaacatggcgagtctattccaccggctctaacgtttttcagaccagggctgggtgcctgataggggcagagcacgtcaataattcctatgagtgtgatatccccataggtgcggggatctgtgccagctatcaaacccaaaccaattcaccagggagcgcaagctctgtggcttctcagagcataattgcatatacaatgtcactgggcgctgagaatagcgttgcatactctaataacagcatagccattcccacgaactttactatcagtgtgacaaccgaaatattgccagtttcgatgaccaaaactagcgtggattgcacgatgtacatctgtggagactctaccgaatgcagcaatctgctattacaatatggcagcttctgtacacagttaaatcgagccttgacaggcatcgcagtggaacaggacaaaaatactcaagaggtgtttgcacaggtgaagcaaatctacaaaacgccccccattaaagattttggcgggttcaatttttcacaaattctccccgacccgtctaagccgagtaagcggtccttcatcgaagatctgctctttaacaaagtaaccctcgccgatgccggctttattaagcagtatggcgactgcctgggggatatagccgctcgtgacctgatttgcgcccagaagttcaatggtctgaccgtgttgcctcctttattgaccgatgaaatgattgcccagtacactagtgccctgctggccggcactatcacgtctgggtggaccttcggagctggtgccgccttgcagataccttttgcaatgcagatggcctataggtttaatggtatcggagtgactcagaacgtactgtacgagaaccagaagctcatcgctaatcaatttaactccgctatcggaaaaatccaggacagcctctcttctacagctagcgctctgggcaaactgcaggatgtcgttaatcagaatgcccaggccctgaacaccttggttaaacaactatcttccaacttcggggccatatccagtgtgttgaatgatattctctcccgcttggatccacctgaagctgaggtgcagatcgatcgcttgatcaccggcagactgcagtccctccagacatatgtaactcagcagctgattagagccgccgagataagggcaagtgcgaatctggctgccaccaagatgagcgaatgtgtattgggccagagcaaacgagttgatttttgcggtaaggggtatcatttaatgtctttccctcaatccgcacctcatggcgtagttttcctgcatgtgacttatgtcccggctcaggagaagaattttaccacagcccccgcgatctgccatgacggaaaggcccacttcccccgggaaggcgtgtttgtatccaatgggactcactggtttgtcactcagcgaaatttttatgaaccacagatcatcaccactgacaacacatttgttagtggaaactgcgatgtggtcatcggcatcgtgaataacactgtctatgatccactgcaacctgaactggattcttttaaagaggaactcgacaagtattttaaaaaccacactagccctgacgtggatctcggtgacatttctggcatcaacgctagcgtagtgaacattcagaaagagatagatagacttaatgaggtggccaagaacctcaacgaaagtctgatcgacctccaggaactggggaaatacgagcagtacattaaatggccttggtacatatggctggggttcattgctgggctgatcgcaatagtgatggtgaccataatgctctgttgcatgactagctgctgcagctgcctgaagggctgctgtagttgtgggtcatgttgtaagtttgacgaagatgatagcgagcctgtccttaaaggagtgaagctccactacacctag

SEQ ID NO: 90 - protein, 1273 aa, synthetic construct
MFVFLVLLPLVSSQCVNLTTRTQLPPAYTNSFTRGVYYPDKVFRSSVLHSTQDLFLPFFSNVTWFHAIHVSGTNGTKRFDNPVLPFNDGVYFASTEKSNIIRGWIFGTTLDSKTQSLLIVNNATNVVIKVCEFQFCNDPFLGVYYHKNNKSWMESEFRVYSSANNCTFEYVSQPFLMDLEGKQGNFKNLREFVFKNIDGYFKIYSKHTPINLVRDLPQGFSALEPLVDLPIGINITRFQTLLALHRSYLTPGDSSSGWTAGAAAYYVGYLQPRTFLLKYNENGTITDAVDCALDPLSETKCTLKSFTVEKGIYQTSNFRVQPTESIVRFPNITNLCPFGEVFNATRFASVYAWNRKRISNCVADYSVLYNSASFSTFKCYGVSPTKLNDLCFTNVYADSFVIRGDEVRQIAPGQTGKIADYNYKLPDDFTGCVIAWNSNNLDSKVGGNYNYLYRLFRKSNLKPFERDISTEIYQAGSTPCNGVEGFNCYFPLQSYGFQPTNGVGYQPYRVVVLSFELLHAPATVCGPKKSTNLVKNKCVNFNFNGLTGTGVLTESNKKFLPFQQFGRDIADTTDAVRDPQTLEILDITPCSFGGVSVITPGTNTSNQVAVLYQGVNCTEVPVAIHADQLTPTWRVYSTGSNVFQTRAGCLIGAEHVNNSYECDIPIGAGICASYQTQTNSPGSASSVASQSIIAYTMSLGAENSVAYSNNSIAIPTNFTISVTTEILPVSMTKTSVDCTMYICGDSTECSNLLLQYGSFCTQLNRALTGIAVEQDKNTQEVFAQVKQIYKTPPIKDFGGFNFSQILPDPSKPSKRSFIEDLLFNKVTLADAGFIKQYGDCLGDIAARDLICAQKFNGLTVLPPLLTDEMIAQYTSALLAGTITSGWTFGAGAALQIPFAMQMAYRFNGIGVTQNVLYENQKLIANQFNSAIGKIQDSLSSTASALGKLQDVVNQNAQALNTLVKQLSSNFGAISSVLNDILSRLDPPEAEVQIDRLITGRLQSLQTYVTQQLIRAAEIRASANLAATKMSECVLGQSKRVDFCGKGYHLMSFPQSAPHGVVFLHVTYVPAQEKNFTTAPAICHDGKAHFPREGVFVSNGTHWFVTQRNFYEPQIITTDNTFVSGNCDVVIGIVNNTVYDPLQPELDSFKEELDKYFKNHTSPDVDLGDISGINASVVNIQKEIDRLNEVAKNLNESLIDLQELGKYEQYIKWPWYIWLGFIAGLIAIVMVTIMLCCMTSCCSCLKGCCSCGSCCKFDEDDSEPVLKGVKLHYT

SEQ ID NO: 91 - DNA, 1887 bp, synthetic construct
  source 1..1887: mol_type = other DNA
atggctggcgaggcccccttcctttacctgtacgcccttgtgtatttcctgcagagcatcaattttgtgagaatcatcatgaggctgtggctttgctggaaatgtaggagcaagaaccccctgttgtatgacgccaactactttctgtgttggcacaccaatctcgccgtgttccagagtgcctctaagatcattacactgaaaaagcggtggcagcttgcactttctaagggagtgcatttcgtttgcaacctgctcctggtgacactcaagcagggggaaatcaaagacgccacccctagcgacttcgttagagccactgccacaatcccaatccaggcttccctgcctttcggctggcttatcgtgggtgtggcactgttggctgtgcggagaccacagggactgcctaataatacagctagctggtttaccgctctgacacagcatggcaaagaagacctcaagttccctcgcggtcagggggtgcctattaacactaatagctctccagacgaccaaattgggtattacaggcgcgccacaagacggatcatggcctgcttagtggggctgatgtggctatcctattttattgctagctttcgcctgaagaaggacaagaagaagaaagctgatgagacccaggcactgccccagcgccaaaagaagcagcagacagtcacactgctccctgctgcagacctggatgacttcagcaagcagctgcaggggaactttggcgaccaggagctgattagacaggggactgactataagcattggcctcagattgctcagttcgccccaagtgcatccgccttcttcgggatgtcacgaataggaatggaagtgaccccttctgggacatggttgacatacaccggagcaatcaagattacctccggggacggtaccacgtctcctattagcgaacacgattatcagatagggggatatactgagaagtgggagtccggcgtcaaaaagatgagtgggaaaggccagcagcaacaaggccaaacagttactaaaaagtctgccgcagaagctagtaaaaagcctcgccagaagcggacagccaccaaagcttacaatgtgactcaggccttcggccgccgggggcctgaacagaccctcttgtggcccgttaccctcgcatgtttcgtgcttgcagctgtgtacaggatcaattggtttaaggatcaggttatcctgttgaacaaacatatagatgcctataagacattcccacccaccgagccaaagaaagataagaaaaagaaaactagtcctgcaaggatggccggcaatggaggagacgcagccttagccctgctcttactcgacaggctgaaccaacttgagtctaaaatgagcggtaaagggcagaagatgaaggatctgtccccaaggtggtatttctactatctgggcaccggccctgaggattgtgtcgtcctccactcatacttcactagcgattattaccagctgtatagtacacaattatctaccgacacaggcgtcgagcacgtgaccttctttatatacaataagatcgtggatgaaccagaggagcatgtgcagatccacactattgatggctctagcgggggcatcatctgggtggcaacagaaggagccctcaacaccccaaaggaccatatcggcaccaggaatccagccaacaatgccgccattgttctgcagctccctcagggcactactctccctaaaggcttctatgctgagggacccggaccaggcgccaaatttgttgctgcttggacactgaaagctgctgctgggcccggaccaggccagtacatcaaggccaactctaagtttatcggcatcaccgaattgggacctggacccggctag

SEQ ID NO: 92 - protein, 628 aa, synthetic construct
MAGEAPFLYLYALVYFLQSINFVRIIMRLWLCWKCRSKNPLLYDANYFLCWHTNLAVFQSASKIITLKKRWQLALSKGVHFVCNLLLVTLKQGEIKDATPSDFVRATATIPIQASLPFGWLIVGVALLAVRRPQGLPNNTASWFTALTQHGKEDLKFPRGQGVPINTNSSPDDQIGYYRRATRRIMACLVGLMWLSYFIASFRLKKDKKKKADETQALPQRQKKQQTVTLLPAADLDDFSKQLQGNFGDQELIRQGTDYKHWPQIAQFAPSASAFFGMSRIGMEVTPSGTWLTYTGAIKITSGDGTTSPISEHDYQIGGYTEKWESGVKKMSGKGQQQQGQTVTKKSAAEASKKPRQKRTATKAYNVTQAFGRRGPEQTLLWPVTLACFVLAAVYRINWFKDQVILLNKHIDAYKTFPPTEPKKDKKKKTSPARMAGNGGDAALALLLLDRLNQLESKMSGKGQKMKDLSPRWYFYYLGTGPEDCVVLHSYFTSDYYQLYSTQLSTDTGVEHVTFFIYNKIVDEPEEHVQIHTIDGSSGGIIWVATEGALNTPKDHIGTRNPANNAAIVLQLPQGTTLPKGFYAEGPGPGAKFVAAWTLKAAAGPGPGQYIKANSKFIGITELGPGPG

SEQ ID NO: 93 - skipped

SEQ ID NO: 94 - protein, 51 aa, synthetic construct
EAPFLYLYALVYFLQSINFVRIIMRLWLCWKCRSKNPLLYDANYFLCWHTN

SEQ ID NO: 95 - protein, 33 aa, synthetic construct
LAVFQSASKIITLKKRWQLALSKGVHFVCNLLL

SEQ ID NO: 96 - protein, 43 aa, synthetic construct
VTLKQGEIKDATPSDFVRATATIPIQASLPFGWLIVGVALLAV

SEQ ID NO: 97 - protein, 55 aa, synthetic construct
RRPQGLPNNTASWFTALTQHGKEDLKFPRGQGVPINTNSSPDDQIGYYRRATRRI

SEQ ID NO: 98 - protein, 19 aa, synthetic construct
MACLVGLMWLSYFIASFRL

SEQ ID NO: 99 - protein, 40 aa, synthetic construct
KKDKKKKADETQALPQRQKKQQTVTLLPAADLDDFSKQLQ

SEQ ID NO: 100 - protein, 55 aa, synthetic construct
GNFGDQELIRQGTDYKHWPQIAQFAPSASAFFGMSRIGMEVTPSGTWLTYTGAIK

SEQ ID NO: 101 - protein, 30 aa, synthetic construct
ITSGDGTTSPISEHDYQIGGYTEKWESGVK

SEQ ID NO: 102 - protein, 50 aa, synthetic construct
KMSGKGQQQQGQTVTKKSAAEASKKPRQKRTATKAYNVTQAFGRRGPEQT

SEQ ID NO: 103 - protein, 20 aa, synthetic construct
LLWPVTLACFVLAAVYRINW

SEQ ID NO: 104 - protein, 30 aa, synthetic construct
FKDQVILLNKHIDAYKTFPPTEPKKDKKKK

SEQ ID NO: 105 - protein, 35 aa, synthetic construct
TSPARMAGNGGDAALALLLLDRLNQLESKMSGKGQ

SEQ ID NO: 106 - protein, 19 aa, synthetic construct
KMKDLSPRWYFYYLGTGPE

SEQ ID NO: 107 - protein, 56 aa, synthetic construct
DCVVLHSYFTSDYYQLYSTQLSTDTGVEHVTFFIYNKIVDEPEEHVQIHTIDGSSG

SEQ ID NO: 108 - protein, 46 aa, synthetic construct
GIIWVATEGALNTPKDHIGTRNPANNAAIVLQLPQGTTLPKGFYAE

SEQ ID NO: 109 - skipped

SEQ ID NO: 110 - protein, 1270 aa, Severe acute respiratory syndrome-related coronavirus
MFVFLVLLPLVSSQCVNLTTRTQLPPAYTNSFTRGVYYPDKVFRSSVLHSTQDLFLPFFSNVTWFHAISGTNGTKRFDNPVLPFNDGVYFASTEKSNIIRGWIFGTTLDSKTQSLLIVNNATNVVIKVCEFQFCNDPFLGVYHKNNKSWMESEFRVYSSANNCTFEYVSQPFLMDLEGKQGNFKNLREFVFKNIDGYFKIYSKHTPINLVRDLPQGFSALEPLVDLPIGINITRFQTLLALHRSYLTPGDSSSGWTAGAAAYYVGYLQPRTFLLKYNENGTITDAVDCALDPLSETKCTLKSFTVEKGIYQTSNFRVQPTESIVRFPNITNLCPFGEVFNATRFASVYAWNRKRISNCVADYSVLYNSASFSTFKCYGVSPTKLNDLCFTNVYADSFVIRGDEVRQIAPGQTGKIADYNYKLPDDFTGCVIAWNSNNLDSKVGGNYNYLYRLFRKSNLKPFERDISTEIYQAGSTPCNGVEGFNCYFPLQSYGFQPTYGVGYQPYRVVVLSFELLHAPATVCGPKKSTNLVKNKCVNFNFNGLTGTGVLTESNKKFLPFQQFGRDIDDTTDAVRDPQTLEILDITPCSFGGVSVITPGTNTSNQVAVLYQGVNCTEVPVAIHADQLTPTWRVYSTGSNVFQTRAGCLIGAEHVNNSYECDIPIGAGICASYQTQTNSHGSASSVASQSIIAYTMSLGAENSVAYSNNSIAIPINFTISVTTEILPVSMTKTSVDCTMYICGDSTECSNLLLQYGSFCTQLNRALTGIAVEQDKNTQEVFAQVKQIYKTPPIKDFGGFNFSQILPDPSKPSKRSFIEDLLFNKVTLADAGFIKQYGDCLGDIAARDLICAQKFNGLTVLPPLLTDEMIAQYTSALLAGTITSGWTFGAGAALQIPFAMQMAYRFNGIGVTQNVLYENQKLIANQFNSAIGKIQDSLSSTASALGKLQDVVNQNAQALNTLVKQLSSNFGAISSVLNDILARLDPPEAEVQIDRLITGRLQSLQTYVTQQLIRAAEIRASANLAATKMSECVLGQSKRVDFCGKGYHLMSFPQSAPHGVVFLHVTYVPAQEKNFTTAPAICHDGKAHFPREGVFVSNGTHWFVTQRNFYEPQIITTHNTFVSGNCDVVIGIVNNTVYDPLQPELDSFKEELDKYFKNHTSPDVDLGDISGINASVVNIQKEIDRLNEVAKNLNESLIDLQELGKYEQYIKWPWYIWLGFIAGLIAIVMVTIMLCCMTSCCSCLKGCCSCGSCCKFDEDDSEPVLKGVKLHYT

SEQ ID NO: 111 - skipped

SEQ ID NO: 112 - protein, 1270 aa, Severe acute respiratory syndrome-related coronavirus
MFVFLVLLPLVSSQCVNFTTRTQLPPAYTNSFTRGVYYPDKVFRSSVLHSTQDLFLPFFSNVTWFHAIHVSGTNGTKRFANPVLPFNDGVYFASTEKSNIIRGWIFGTTLDSKTQSLLIVNNATNVVIKVCEFQFCNDPFLGVYYHKNNKSWMESEFRVYSSANNCTFEYVSQPFLMDLEGKQGNFKNLREFVFKNIDGYFKIYSKHTPINLVRGLPQGFSALEPLVDLPIGINITRFQTLHISYLTPGDSSSGWTAGAAAYYVGYLQPRTFLLKYNENGTITDAVDCALDPLSETKCTLKSFTVEKGIYQTSNFRVQPTESIVRFPNITNLCPFGEVFNATRFASVYAWNRKRISNCVADYSVLYNSASFSTFKCYGVSPTKLNDLCFTNVYADSFVIRGDEVRQIAPGQTGNIADYNYKLPDDFTGCVIAWNSNNLDSKVGGNYNYLYRLFRKSNLKPFERDISTEIYQAGSTPCNGVKGFNCYFPLQSYGFQPTYGVGYQPYRVVVLSFELLHAPATVCGPKKSTNLVKNKCVNFNFNGLTGTGVLTESNKKFLPFQQFGRDIADTTDAVRDPQTLEILDITPCSFGGVSVITPGTNTSNQVAVLYQGVNCTEVPVAIHADQLTPTWRVYSTGSNVFQTRAGCLIGAEHVNNSYECDIPIGAGICASYQTQTNSPGSASSVASQSIIAYTMSLGVENSVAYSNNSIAIPTNFTISVTTEILPVSMTKTSVDCTMYICGDSTECSNLLLQYGSFCTQLNRALTGIAVEQDKNTQEVFAQVKQIYKTPPIKDFGGFNFSQILPDPSKPSKRSFIEDLLFNKVTLADAGFIKQYGDCLGDIAARDLICAQKFNGLTVLPPLLTDEMIAQYTSALLAGTITSGWTFGAGAALQIPFAMQMAYRFNGIGVTQNVLYENQKLIANQFNSAIGKIQDSLSSTASALGKLQDVVNQNAQALNTLVKQLSSNFGAISSVLNDILSRLDPPEAEVQIDRLITGRLQSLQTYVTQQLIRAAEIRASANLAATKMSECVLGQSKRVDFCGKGYHLMSFPQSAPHGVVFLHVTYVPAQEKNFTTAPAICHDGKAHFPREGVFVSNGTHWFVTQRNFYEPQIITTDNTFVSGNCDVVIGIVNNTVYDPLQPELDSFKEELDKYFKNHTSPDVDLGDISGINASVVNIQKEIDRLNEVAKNLNESLIDLQELGKYEQYIKWPWYIWLGFIAGLIAIVMVTIMLCCMTSCCSCLKGCCSCGSCCKFDEDDSEPVLKGVKLHYT

SEQ ID NO: 113-114 - skipped (2 entries)

SEQ ID NO: 115 - protein, 100 aa, synthetic construct
VTNTEMFVTAPDNLGYMYEVQWPGQTQPQIANCSVYDFFVWLHYYSVRDTVTNTEMFVTAPDNLGYMYEVQWPGQTQPQIANCSVYDFFVWLHYYSVRDT

SEQ ID NO: 116 - protein, 25 aa, synthetic construct
VTNTEMFVTAPDNLGYMYEVQWPGQ

SEQ ID NO: 117 - protein, 25 aa, synthetic construct
TQPQIANCSVYDFFVWLHYYSVRDT

SEQ ID NO: 118 - RNA, 19 nt, synthetic construct
  source 1..19: mol_type = other RNA
taatacgactcactatagg

SEQ ID NO: 119 - DNA, 20 bp, synthetic construct
  source 1..20: mol_type = other DNA
taatacgactcactataggn

SEQ ID NO: 120 - RNA, 17 nt, synthetic construct
  source 1..17: mol_type = other RNA
taatacgactcactata

SEQ ID NO: 121 - DNA, 18 bp, synthetic construct
  source 1..18: mol_type = other DNA
taatacgactcactatan

SEQ ID NO: 122 - RNA, 17 nt, synthetic construct
  source 1..17: mol_type = other RNA
atttaggtgacactata

SEQ ID NO: 123 - DNA, 25 bp, synthetic construct
  source 1..25: mol_type = other DNA
cccccttcagcctgaacttgattcc

SEQ ID NO: 124 - DNA, 25 bp, synthetic construct
  source 1..25: mol_type = other DNA
tccactgcaacctgaacttgatagt

SEQ ID NO: 125 - protein, 4 aa, synthetic construct
RRAR

SEQ ID NO: 126 - protein, 4 aa, synthetic construct
GSAS

SEQ ID NO: 127 - protein, 8 aa, synthetic construct
MESLVPGF

SEQ ID NO: 128 - protein, 10 aa, synthetic construct
VELVAELEGI

SEQ ID NO: 129 - protein, 8 aa, Venezuelan equine encephalitis virus
SIINFEKL

SEQ ID NO: 130-8218 - skipped (8089 entries)

SEQ ID NO: 8219 - protein, 10 aa, synthetic construct
VELVAELEGI

SEQ ID NO: 8220-27179 - skipped (18960 entries)

SEQ ID NO: 27180 - protein, 15 aa, synthetic construct
MFVFLVLLPLVSSQC

SEQ ID NO: 27181-27495 - skipped (315 entries)

SEQ ID NO: 27496 - protein, 15 aa, synthetic construct
LLWPVTLACFVLAAV

SEQ ID NO: 27497-27603 - skipped (107 entries)

SEQ ID NO: 27604 - protein, 9 aa, synthetic construct
ALSKGVHFV

SEQ ID NO: 27605-27939 - skipped (335 entries)

SEQ ID NO: 27940 - RNA, 80 nt, synthetic construct
  source 1..80: mol_type = other RNA
aaaaaaaaaaaaaaaaaaaaaaaaaaaaaaaaaaaaaaaaaaaaaaaaaaaaaaaaaaaaaaaaaaaaaaaaaaaaaaaa

SEQ ID NO: 27941-27943 - skipped (3 entries)

SEQ ID NO: 27944 - protein, 23 aa, synthetic construct
HIDAYKTFPPTEPKKDKKKKADE

SEQ ID NO: 27945 - protein, 17 aa, synthetic construct
CRSKNPLLYDANYFLCW

SEQ ID NO: 27946 - protein, 29 aa, synthetic construct
FEYYHTTDPSFLGRYMSALNHTKKWKYPQ

SEQ ID NO: 27947 - protein, 18 aa, synthetic construct
ISNEKQEILGTVSWNLRE

SEQ ID NO: 27948 - protein, 44 aa, synthetic construct
DIKDLPKEITVATSRTLSYYKLGASQRVAGDSGFAAYSRYRIGN

SEQ ID NO: 27949 - protein, 24 aa, synthetic construct
VRATATIPIQASLPFGWLIVGVAL

SEQ ID NO: 27950 - protein, 24 aa, synthetic construct
YLTFYLTNDVSFLAHIQWMVMFTP

SEQ ID NO: 27951 - protein, 21 aa, synthetic construct
GLMWLSYFIASFRLFARTRSM

SEQ ID NO: 27952 - protein, 19 aa, synthetic construct
DWYDFVENPDILRVYANLG

SEQ ID NO: 27953 - protein, 17 aa, synthetic construct
PYPNASFDNFKFVCDNI

SEQ ID NO: 27954 - protein, 21 aa, synthetic construct
NFNKDFYDFAVSKGFFKEGSS

SEQ ID NO: 27955 - protein, 18 aa, synthetic construct
DGVPFVVSTGYHFRELGV

SEQ ID NO: 27956 - protein, 27 aa, synthetic construct
ACPLIAAVITREVGFVVPGLPGTILRT

SEQ ID NO: 27957 - protein, 17 aa, synthetic construct
ATTRQVVNVVTTKIALK

SEQ ID NO: 27958 - protein, 20 aa, synthetic construct
SRIGMEVTPSGTWLTYTGAI

SEQ ID NO: 27959 - protein, 17 aa, synthetic construct
TLACFVLAAVYRINWIT

SEQ ID NO: 27960 - protein, 22 aa, synthetic construct
GGDGKMKDLSPRWYFYYLGTGP

SEQ ID NO: 27961 - protein, 27 aa, synthetic construct
GPLVRKIFVDGVPFVVSTGYHFRELGV

SEQ ID NO: 27962 - protein, 39 aa, synthetic construct
PVYSFLPGVYSVIYLYLTFYLTNDVSFLAHIQWMVMFTP

SEQ ID NO: 27963 - protein, 18 aa, synthetic construct
NNLDKSAGFPFNKWGKAR

SEQ ID NO: 27964 - protein, 19 aa, synthetic construct
TLACFVLAAVYRINWITGG

SEQ ID NO: 27965 - protein, 17 aa, synthetic construct
TYNKVENMTPRDLGACI

SEQ ID NO: 27966 - protein, 22 aa, synthetic construct
KQGDDYVYLPYPDPSRILGAGC

SEQ ID NO: 27967 - protein, 26 aa, synthetic construct
SLATVAYFNMVYMPASWVMRIMTWLD

SEQ ID NO: 27968 - protein, 17 aa, synthetic construct
GNCDTLKEILVTYNCCD

SEQ ID NO: 27969 - protein, 31 aa, synthetic construct
EAFEYYHTTDPSFLGRYMSALNHTKKWKYPQ

SEQ ID NO: 27970 - protein, 37 aa, synthetic construct
WPQIAQFAPSASAFFGMSRIGMEVTPSGTWLTYTGAI

SEQ ID NO: 27971 - protein, 60 aa, synthetic construct
ACPLIAAVITREVGFVVPGLPGTILRTTNGDFLHFLPRVFSAVGNICYTPSKLIEYTDFA

SEQ ID NO: 27972 - protein, 31 aa, synthetic construct
NVAFQTVKPGNFNKDFYDFAVSKGFFKEGSS

SEQ ID NO: 27973 - protein, 22 aa, synthetic construct
GASQRVAGDSGFAAYSRYRIGN

SEQ ID NO: 27974 - protein, 17 aa, synthetic construct
GTGTSTDVVYRAFDIYN

SEQ ID NO: 27975 - protein, 19 aa, synthetic construct
IKWDLLKYDFTEERLKLFD

SEQ ID NO: 27976 - protein, 40 aa, synthetic construct
NVLFSTVFPPTSFGPLVRKIFVDGVPFVVSTGYHFRELGV

SEQ ID NO: 27977 - protein, 34 aa, synthetic construct
NLHSSRLSFKELLVYAADPAMHAASGNLLLDKRT

SEQ ID NO: 27978 - protein, 57 aa, synthetic construct
AVSKGFFKEGSSVELKHFFFAQDGNAAISDYDYYRYNLPTMCDIRQLLFVVEVVDKY

SEQ ID NO: 27979 - protein, 30 aa, synthetic construct
CINANQVIVNNLDKSAGFPFNKWGKARLYY

SEQ ID NO: 27980 - protein, 46 aa, synthetic construct
VAGVSICSTMTNRQFHQKLLKSIAATRGATVVIGTSKFYGGWHNML

SEQ ID NO: 27981 - protein, 22 aa, synthetic construct
FVNEFYAYLRKHFSMMILSDDA

SEQ ID NO: 27982 - protein, 27 aa, synthetic construct
TMLVKQGDDYVYLPYPDPSRILGAGCF

SEQ ID NO: 27983 - protein, 55 aa, synthetic construct
TDGTLMIERFVSLAIDAYPLTKHPNQEYADVFHLYLQYIRKLHDELTGHMLDMYS

SEQ ID NO: 27984 - protein, 17 aa, synthetic construct
TSRYWEPEFYEAMYTPH

SEQ ID NO: 27985 - protein, 26 aa, synthetic construct
YGDAVVYRGTTTYKLNVGDYFVLTSH

SEQ ID NO: 27986 - protein, 39 aa, synthetic construct
PGTGKSHFAIGLALYYPSARIVYTACSHAAVDALCEKAL

SEQ ID NO: 27987 - protein, 19 aa, synthetic construct
ISMATNYDLSVVNARLRAK

SEQ ID NO: 27988 - protein, 22 aa, synthetic construct
PRTLLTKGTLEPEYFNSVCRLM

SEQ ID NO: 27989 - protein, 22 aa, synthetic construct
TCRRCPAEIVDTVSALVYDNKL

SEQ ID NO: 27990 - protein, 22 aa, synthetic construct
MFYKGVITHDVSSAINRPQIGV

SEQ ID NO: 27991 - protein, 26 aa, synthetic construct
FTQTTETAHSCNVNRFNVAITRAKVG

SEQ ID NO: 27992 - protein, 29 aa, synthetic construct
RDAAMQRKLEKMADQAMTQMYKQARSEDK

SEQ ID NO: 27993 - protein, 23 aa, synthetic construct
GTTFTYASALWEIQQVVDADSKI

SEQ ID NO: 27994 - protein, 17 aa, synthetic construct
SPNLAWPLIVTALRANS

SEQ ID NO: 27995 - protein, 21 aa, synthetic construct
DMTYRRLISMMGFKMNYQVNG

SEQ ID NO: 27996 - protein, 33 aa, synthetic construct
TLKNLSDRVVFVLWAHGFELTSMKYFVKIGPER

SEQ ID NO: 27997 - protein, 24 aa, synthetic construct
LYCQVHGNAHVASCDAIMTRCLAV

SEQ ID NO: 27998 - protein, 19 aa, synthetic construct
DKFPVLHDIGNPKAIKCVP

SEQ ID NO: 27999 - protein, 17 aa, synthetic construct
CDGGSLYVNKHAFHTPA

SEQ ID NO: 28000 - protein, 17 aa, synthetic construct
LWVYKQFDTYNLWNTFT

SEQ ID NO: 28001 - protein, 17 aa, synthetic construct
MKDLSPRWYFYYLGTGP

SEQ ID NO: 28002 - protein, 23 aa, synthetic construct
WPQIAQFAPSASAFFGMSRIGME

SEQ ID NO: 28003 - protein, 24 aa, synthetic construct
TANPKTPKYKFVRIQPGQTFSVLA

SEQ ID NO: 28004 - protein, 22 aa, synthetic construct
CVSFCYMHHMELPTGVHAGTDL

SEQ ID NO: 28005 - protein, 20 aa, synthetic construct
ALLEDEFTPFDVVRQCSGVT

SEQ ID NO: 28006 - protein, 18 aa, synthetic construct
NKTVGELGDVRETMSYLF

SEQ ID NO: 28007 - protein, 24 aa, synthetic construct
NNYMLTYNKVENMTPRDLGACIDC

SEQ ID NO: 28008 - protein, 23 aa, synthetic construct
VKYLYFIKGLNNLNRGMVLGSLA

SEQ ID NO: 28009 - protein, 17 aa, synthetic construct
PLLESELVIGAVILRGH

SEQ ID NO: 28010 - protein, 17 aa, synthetic construct
AAYSRYRIGNYKLNTDH

SEQ ID NO: 28011 - protein, 18 aa, synthetic construct
WAQCVQLHNDILLAKDTT

SEQ ID NO: 28012 - protein, 27 aa, synthetic construct
GVSFSTFEEAALCTFLLNKEMYLKLRS

SEQ ID NO: 28013 - protein, 25 aa, synthetic construct
KHFFFAQDGNAAISDYDYYRYNLPT

SEQ ID NO: 28014 - protein, 28 aa, synthetic construct
SDRVVFVLWAHGFELTSMKYFVKIGPER

SEQ ID NO: 28015 - protein, 17 aa, synthetic construct
FYAYLRKHFSMMILSDD

SEQ ID NO: 28016 - protein, 25 aa, synthetic construct
MQRKLEKMADQAMTQMYKQARSEDK

SEQ ID NO: 28017 - protein, 29 aa, synthetic construct
PGTGKSHFAIGLALYYPSARIVYTACSHA

SEQ ID NO: 28018 - protein, 24 aa, synthetic construct
VRKIFVDGVPFVVSTGYHFRELGV

SEQ ID NO: 28019 - protein, 40 aa, synthetic construct
DAYPLTKHPNQEYADVFHLYLQYIRKLHDELTGHMLDMYS

SEQ ID NO: 28020 - protein, 1271 aa, synthetic construct
MFVFLVLLPLVSSQCVNLRTRTQLPPAYTNSFTRGVYYPDKVFRSSVLHSTQDLFLPFFSNVTWFHAIHVSGTNGTKRFDNPVLPFNDGVYFASTEKSNIIRGWIFGTTLDSKTQSLLIVNNATNVVIKVCEFQFCNDPFLDVYYHKNNKSWMESGVYSSANNCTFEYVSQPFLMDLEGKQGNFKNLREFVFKNIDGYFKIYSKHTPINLVRDLPQGFSALEPLVDLPIGINITRFQTLLALHRSYLTPGDSSSGWTAGAAAYYVGYLQPRTFLLKYNENGTITDAVDCALDPLSETKCTLKSFTVEKGIYQTSNFRVQPTESIVRFPNITNLCPFGEVFNATRFASVYAWNRKRISNCVADYSVLYNSASFSTFKCYGVSPTKLNDLCFTNVYADSFVIRGDEVRQIAPGQTGKIADYNYKLPDDFTGCVIAWNSNNLDSKVGGNYNYRYRLFRKSNLKPFERDISTEIYQAGSKPCNGVEGFNCYFPLQSYGFQPTNGVGYQPYRVVVLSFELLHAPATVCGPKKSTNLVKNKCVNFNFNGLTGTGVLTESNKKFLPFQQFGRDIADTTDAVRDPQTLEILDITPCSFGGVSVITPGTNTSNQVAVLYQGVNCTEVPVAIHADQLTPTWRVYSTGSNVFQTRAGCLIGAEHVNNSYECDIPIGAGICASYQTQTNSRGSASSVASQSIIAYTMSLGAENSVAYSNNSIAIPTNFTISVTTEILPVSMTKTSVDCTMYICGDSTECSNLLLQYGSFCTQLNRALTGIAVEQDKNTQEVFAQVKQIYKTPPIKDFGGFNFSQILPDPSKPSKRSFIEDLLFNKVTLADAGFIKQYGDCLGDIAARDLICAQKFNGLTVLPPLLTDEMIAQYTSALLAGTITSGWTFGAGAALQIPFAMQMAYRFNGIGVTQNVLYENQKLIANQFNSAIGKIQDSLSSTASALGKLQNVVNQNAQALNTLVKQLSSNFGAISSVLNDILSRLDPPEAEVQIDRLITGRLQSLQTYVTQQLIRAAEIRASANLAATKMSECVLGQSKRVDFCGKGYHLMSFPQSAPHGVVFLHVTYVPAQEKNFTTAPAICHDGKAHFPREGVFVSNGTHWFVTQRNFYEPQIITTDNTFVSGNCDVVIGIVNNTVYDPLQPELDSFKEELDKYFKNHTSPDVDLGDISGINASVVNIQKEIDRLNEVAKNLNESLIDLQELGKYEQYIKWPWYIWLGFIAGLIAIVMVTIMLCCMTSCCSCLKGCCSCGSCCKFDEDDSEPVLKGVKLHYT

SEQ ID NO: 28021 - protein, 217 aa, synthetic construct
MFVFLVLLPLVSSRVAPVTEVVRFPNITNLCPFDKVFNATRFPSVYAWERTKISDCVADYTVFYNSTSFSTFNCYGVSPSKLIDLCFTSVYADTFLIRFSEVRQVAPGQTGVIADYNYKLPDDFTGCVIAWNTAKYDVGSYFYRSHRSSKLKPFERDLSSEENGARTLSTYDFNQNVPLEYQATRVVVLSFELLNAPATVCGPKLSTSLVKNQCVNF

SEQ ID NO: 28022 - protein, 218 aa, synthetic construct
MFVFLVLLPLVSSRVSPTQEVVRFPNITNRCPFDKVFNATRFPNVYAWERTKISDCVADYTVLYNSTSFSTFKCYGVSPSKLIDLCFTSVYADTFLIRSSEVRQVAPGETGVIADYNYKLPDDFTGCVIAWNTAKQDTGNYYYRSHRKTKLKPFERDLSSDDGNGVYTLSTYDFNPNVPVAYQATRVVVLSFELLNAPATVCGPKLSTQLVKNQCVNF

SEQ ID NO: 28023 - protein, 235 aa, synthetic construct
MFVFLVLLPLVSSRVAPSKEVVRFPNITNLCPFGEVFNATTFPSVYAWERKRISNCVADYSVLYNSTSFSTFKCYGVSATKLNDLCFSNVYADSFVVKGDDVRQIAPGQTGVIADYNYKLPDDFMGCVLAWNTRNIDATSTGNYNYKYRSLRHGKLRPFERDISNVPFSPDGKPCTPPAFNCYWPLNDYGFFTTNGIGYQPYRVVVLSFELLNAPATVCGPKLSTDLIKNQCVNF

SEQ ID NO: 28024 - protein, 217 aa, synthetic construct
MFVFLVLLPLVSSRVSPVTEVVRFPNITNLCPFDKVFNATRFPSVYAWERTKISDCVADYTVFYNSTSFSTFNCYGVSPSKLIDLCFTSVYADTFLIRFSEVRQVAPGQTGVIADYNYKLPDDFTGCVIAWNTAKQDVGSYFYRSHRSSKLKPFERDLSSVEENGRTLSTYDFNQNVPLEYQATRVVVLSFELLNAPATVCGPKLSTSLVKNQCVNF

SEQ ID NO: 28025 - protein, 218 aa, synthetic construct
MFVFLVLLPLVSSRVSPTQEVIRFPNITNRCPFDRVFNASRFPSVYAWERTKISECVADYTVLYNSTSFSTFKCYGVSPSKLIDLCFTSVYADTFLIRSSEVRQVAPGETGVIADYNYKLPDDFTGCVIAWNTAKQDTGNYYYRSHRKTKLKPFERDLSSDDGNGVYTLSTYDFNPNVPVAYQATRVVVLSFELLNAPATVCGPKLSTQLVKNQCVNF

SEQ ID NO: 28026 - protein, 217 aa, synthetic construct
MFVFLVLLPLVSSRVSPSTEVIRFPNITNRCPFDRVFNASRFPSVYAWERTKISDCVADYTVLYNSTSFSTFKCYGVSPSKLIDLCFTSVYADTFLIRFSEVRQIAPGETGVIADYNYKLPDEFTGCVIAWNTANQDRGQYYYRSSRKTKLKPFERDLSSDENGVRTLSTYDFYPSVPLEYQATRVVVLSFELLNAPATVCGPKLSTSLIKNQCVNF

SEQ ID NO: 28027 - protein, 235 aa, synthetic construct
MFVFLVLLPLVSSRVVPSGDVVRFPNITNLCPFGEVFNATKFPSVYAWERKKISNCVADYSVLYNSTFFSTFKCYGVSATKLNDLCFSNVYADSFVVKGDDVRQIAPGQTGVIADYNYKLPDDFMGCVLAWNTRNIDATSTGNYNYKYRYLRHGKLRPFERDISNVPFSPDGKPCTPPALNCYWPLNDYGFYTTTGIGYQPYRVVVLSFELLNAPATVCGPKLSTDLIKNQCVNF

SEQ ID NO: 28028 - protein, 30 aa, synthetic construct
GYIPEAPRDGQAYVRKDGEWVFLSTFLSPA

SEQ ID NO: 28029 - protein, 43 aa, synthetic construct
GGSGGIKEEIAKIKEEQAKIKEKIAEIEKRIAEIEKRIAGGCC

SEQ ID NO: 28030 - protein, 33 aa, synthetic construct
RMKQIEDKIEEILSKIYHIENEIARIKKLIGER

SEQ ID NO: 28031 - protein, 859 aa, synthetic construct
MFVFLVLLPLVSSRVSPVTEVVRFPNITNLCPFDKVFNATRFPSVYAWERTKISDCVADYTVFYNSTSFSTFNCYGVSPSKLIDLCFTSVYADTFLIRFSEVRQVAPGQTGVIADYNYKLPDDFTGCVIAWNTAKQDVGSYFYRSHRSSKLKPFERDLSSVEENGRTLSTYDFNQNVPLEYQATRVVVLSFELLNAPATVCGPKLSTSLVKNQCVNFGGSGGSGGYIPEAPRDGQAYVRKDGEWVFLSTFLSPAGGSGGVRAEGRGSLLTCGDVEENPGPRRRARMFVFLVLLPLVSSRVSPTQEVVRFPNITNRCPFDKVFNATRFPNVYAWERTKISDCVADYTVLYNSTSFSTFKCYGVSPSKLIDLCFTSVYADTFLIRSSEVRQVAPGETGVIADYNYKLPDDFTGCVIAWNTAKQDTGNYYYRSHRKTKLKPFERDLSSDDGNGVYTLSTYDFNPNVPVAYQATRVVVLSFELLNAPATVCGPKLSTQLVKNQCVNFGGSGGSGGGSGGIKEEIAKIKEEQAKIKEKIAEIEKRIAEIEKRIAGGCCGGSGGVRAEGRGSLLTCGDVEENPGPRRRARMFVFLVLLPLVSSRVAPSKEVVRFPNITNLCPFGEVFNATTFPSVYAWERKRISNCVADYSVLYNSTSFSTFKCYGVSATKLNDLCFSNVYADSFVVKGDDVRQIAPGQTGVIADYNYKLPDDFMGCVLAWNTRNIDATSTGNYNYKYRSLRHGKLRPFERDISNVPFSPDGKPCTPPAFNCYWPLNDYGFFTTNGIGYQPYRVVVLSFELLNAPATVCGPKLSTDLIKNQCVNFGGSGGSGRMKQIEDKIEEILSKIYHIENEIARIKKLIGER

SEQ ID NO: 28032 - DNA, 3825 bp, synthetic construct
  source 1..3825: mol_type = other DNA
gccaccatgtttgtcttcctggtcttgctgccgctggtgagcagccagtgcgtgaatctccgcacccgcacccagcttccacctgcctacactaacagcttcacccgaggggtgtattaccctgacaaggtattccggtcctccgtcctccatagcacgcaggacctttttctgcccttcttctcaaatgtgacatggttccatgccattcacgtgagcggcacgaatggaacgaagcgctttgataaccccgtgctgcctttcaatgacggcgtctacttcgcctccactgaaaagtcaaacatcatccggggctggatctttggcaccactcttgattcaaagacccagtcactgctgattgtgaacaatgctacaaacgtggttatcaaggtgtgtgagtttcagttctgtaacgatccatttttggatgtgtactaccacaagaacaacaagtcctggatggagtctggagtgtatagctctgctaacaactgcaccttcgagtacgtgtcccagcctttccttatggacctggaaggcaaacagggcaatttcaaaaacctgagagagttcgtgtttaagaacattgacggatacttcaaaatttattctaagcacacaccaattaacttagtgcgggacctaccccaaggctttagcgccctagagcccctggttgacctgcccattgggatcaatataacaaggttccaaactctactggctctgcatagaagttatctgaccccaggagacagctctagtggttggaccgccggcgcagcagcctactatgtcgggtacttacagccacgcacgttccttctgaagtacaatgagaacgggacaatcactgacgcagtagactgtgcactggacccgctaagcgagactaagtgcacacttaaatccttcacggtggagaaaggcatttatcagacctctaacttcagggtgcagccaacagaaagcattgtgcgattcccaaatattactaatctttgccctttcggggaggtctttaatgcaactagattcgcatcagtctatgcgtggaaccgcaaacgcatttccaattgtgtcgcagactactcagtgctgtacaactctgcctctttcagtacgttcaagtgttacggagtgtcacccactaaactgaacgacctgtgctttacaaatgtctacgctgactccttcgtgattaggggagacgaggtgagacaaattgcccccggacagactgggaagattgccgactacaattataagcttcctgatgatttcactggctgtgttattgcctggaatagtaacaatctggatagcaaggtgggaggcaactataactacagatatcgactgtttaggaagagtaatctgaaaccatttgagcgggatatttccacagaaatttaccaggccgggagcaaaccatgtaatggggtggagggatttaattgttacttcccactccagagctatggtttccaacccaccaatggagtgggttaccagccctatagagtcgtggtgcttagttttgagctgcttcacgccccagcaaccgtctgcggtcccaaaaagtcgaccaatctcgtgaaaaacaaatgcgtaaacttcaactttaacggcttaacaggaaccggcgtgctcaccgaaagcaacaagaaattccttccatttcagcaattcggaagggacatcgccgacacaacagacgcggtgagggacccacagactctggagatactggacatcactccttgttcgtttgggggcgtctcggtcatcacacccgggactaatactagtaatcaggtagcagttttatatcaaggcgtcaactgtaccgaagtacctgtggccatacacgctgatcagctaacgccaacatggcgagtctattccaccggctctaacgtttttcagaccagggctgggtgcctgataggggcagagcacgtcaataattcctatgagtgtgatatccccataggtgcggggatctgtgccagctatcaaacccaaaccaattcacgagggagcgcaagctctgtggcttctcagagcataattgcatatacaatgtcactgggcgctgagaatagcgttgcatactctaataacagcatagccattcccacgaactttactatcagtgtgacaaccgaaatattgccagtttcgatgaccaaaactagcgtggattgcacgatgtacatctgtggagactctaccgaatgcagcaatctgctattacaatatggcagcttctgtacacagttaaatcgagccttgacaggcatcgcagtggaacaggacaaaaatactcaagaggtgtttgcacaggtgaagcaaatctacaaaacgccccccattaaagattttggcgggttcaatttttcacaaattctccccgacccgtctaagccgagtaagcggtccttcatcgaagatctgctctttaacaaagtaaccctcgccgatgccggctttattaagcagtatggcgactgcctgggggatatagccgctcgtgacctgatttgcgcccagaagttcaatggtctgaccgtgttgcctcctttattgaccgatgaaatgattgcccagtacactagtgccctgctggccggcactatcacgtctgggtggaccttcggagctggtgccgccttgcagataccttttgcaatgcagatggcctataggtttaatggtatcggagtgactcagaacgtactgtacgagaaccagaagctcatcgctaatcaatttaactccgctatcggaaaaatccaggacagcctctcttctacagctagcgctctgggcaaactgcagaatgtcgttaatcagaatgcccaggccctgaacaccttggttaaacaactatcttccaacttcggggccatatccagtgtgttgaatgatattctctcccgcttggatccacctgaagctgaggtgcagatcgatcgcttgatcaccggcagactgcagtccctccagacatatgtaactcagcagctgattagagccgccgagataagggcaagtgcgaatctggctgccaccaagatgagcgaatgtgtattgggccagagcaaacgagttgatttttgcggtaaggggtatcatttaatgtctttccctcaatccgcacctcatggcgtagttttcctgcatgtgacttatgtcccggctcaggagaagaattttaccacagcccccgcgatctgccatgacggaaaggcccacttcccccgggaaggcgtgtttgtatccaatgggactcactggtttgtcactcagcgaaatttttatgaaccacagatcatcaccactgacaacacatttgttagtggaaactgcgatgtggtcatcggcatcgtgaataacactgtctatgatccactgcaacctgaactggattcttttaaagaggaactcgacaagtattttaaaaaccacactagccctgacgtggatctcggtgacatttctggcatcaacgctagcgtagtgaacattcagaaagagatagatagacttaatgaggtggccaagaacctcaacgaaagtctgatcgacctccaggaactggggaaatacgagcagtacattaaatggccttggtacatatggctggggttcattgctgggctgatcgcaatagtgatggtgaccataatgctctgttgcatgactagctgctgcagctgcctgaagggctgctgtagttgtgggtcatgttgtaagtttgacgaagatgatagcgagcctgtccttaaaggagtgaagctccactacacctagtaa

SEQ ID NO: 28033 - DNA, 2589 bp, synthetic construct
  source 1..2589: mol_type = other DNA
gccaccatgtttgtcttcctggtcttgctgccgctggtgagcagccgcgtgtctcccgttactgaagtcgtccggttcccaaacatcacaaatctctgtccttttgacaaagtgtttaatgctacgcgctttccttctgtatacgcctgggagcggaccaagatctcagattgcgtggccgactacaccgtgttctataattccacctccttcagcaccttcaactgctacggcgtgagcccatctaaactgattgatttgtgctttacgagtgtgtacgcggatactttcctgattaggttttcggaagttcgtcaagtagcccccggccagacgggagtgatagctgattacaactataaactgcctgatgacttcaccggctgtgtaatagcgtggaatacggctaagcaggatgtaggctcctacttctatcgttcgcaccggtcgtcgaaattaaagccgtttgagcgtgacctctcgtcagtagaggaaaacggtagaacgctgagcacctatgactttaatcaaaacgtgcccttagagtatcaggccactagagtagtagtcctctcatttgaactgttaaatgcacccgcaacagtttgtgggccgaagttgagcactagcctagttaagaaccagtgtgtgaacttcggaggtagcggcggttctggaggctacattccagaagctccacgcgatggccaggcttatgtgcggaaagatggcgagtgggtgtttctcagcacctttctgagtccagctggcggtagcggcggggttcgggcagagggcagaggctcactgctcacgtgtggtgatgtagaagagaatccaggtcctaggaggcgagcacggatgttcgtatttctggtgctgctgcccctagtgagctccagggtgtcgcccacccaggaggtagtgaggttccctaacataactaatcggtgcccctttgataaagtttttaacgccactagattcccaaatgtgtatgcatgggagagaactaaaatttcagactgcgtcgctgactacaccgtgttgtataatagtaccagtttcagtacattcaagtgttacggcgtgtccccttccaaactcatcgacctttgcttcaccagcgtctacgcggatacttttcttattagatcttcggaggtccgccaggtagcaccaggggaaacaggagtaatagctgattataactacaaactaccagacgatttcacaggttgcgtgatcgcctggaacacagctaagcaggacacgggaaattactactataggagccataggaagaccaagctcaagccttttgagagagatctgtcttctgacgacggaaatggcgtttatacactgtcaacctacgacttcaatcctaatgtgcccgttgcctaccaggccaccagagtcgtggtgctgagcttcgagctgctgaacgcccctgctacagtctgcggccctaagctgagcacacagctggtgaagaatcagtgtgtgaattttggaggtagcggcggttctggaggggggtctggaggcataaaggaagagattgccaagattaaggaagaacaggcaaagataaaagaaaagattgcagagattgaaaaaaggattgctgagatcgagaaaaggatagcaggaggttgttgcggcggtagcggcggtgtccgtgctgaaggacgcgggtcccttctcacctgcggcgacgttgaggaaaaccctggccctagaaggcgagcacggatgttcgtgttcctggtgcttctccctctggtgtctagccgtgtggcccccagcaaggaagtcgtgcgcttccccaacatcacaaatctctgtccttttggagaggtcttcaatgcaaccacattcccttccgtgtacgcctgggagagaaaacggatttccaactgcgtggctgactacagcgtgctttataattctaccagtttctctaccttcaaatgctacggcgtgtctgccacaaaactaaatgatctgtgcttcagcaatgtgtatgccgacagctttgttgtgaagggagatgatgtgcggcagattgcacccggccagaccggggttatcgccgactacaactataagctgcccgatgacttcatgggctgcgtgctcgcttggaacacaagaaacattgatgccacctcaaccggaaactacaattacaaatatcgaagcttgcggcacgggaaactgaggccatttgaaagggacatcagcaacgtgcccttctcaccggatggaaagccatgcaccccccctgcctttaattgctactggcccctgaacgactatggcttcttcacaaccaatggcattggatatcagccctacagagtggtggtgctgagttttgagctgctgaacgctcccgctacagtgtgcggacccaagctcagcacagacctgatcaagaaccagtgtgtgaacttcggaggtagcggcggttctggaagaatgaaacagattgaggataaaattgaagagatattgtcaaagatctatcacatagagaacgaaatcgcccgaataaagaagctgattggggaacgctagtga

SEQ ID NO: 28034 - DNA, 2589 bp, synthetic construct
  source 1..2589: mol_type = other DNA
gccaccatgtttgtcttcctggtcttgctgccgctggtgagcagcagggtagcgcccgtgactgaggtagtccgcttccccaacatcaccaacctgtgcccatttgataaagtgttcaatgccacaaggttcccatctgtatacgcatgggaacggaccaaaattagtgactgtgtggccgattacaccgtgttttacaacagtacctctttttccacattcaactgctatggagtttctccttcaaagcttatcgatctatgtttcacttctgtttacgctgacacttttctgatccgtttctcagaagtccgacaggtcgcccctggtcaaacaggggtgatagcggattataattacaagcttccggatgacttcactggctgcgttattgcttggaacactgccaaatatgacgtcggctcatacttctatcgctcacaccggtcgagcaagctcaagccttttgaaagggatctcagcagcgaggagaatggggccagaaccctgagcacctatgactttaaccagaatgtgccactggaataccaggctacgagagtggtggtcctgagcttcgagctgttgaatgcacccgcaacagtttgtggccctaaactgtccacaagcctggtgaagaatcagtgtgtaaactttggaggtagcggcggttctggaggctacattccagaagctccacgcgatggccaggcttatgtgcggaaagatggcgagtgggtgtttctcagcacctttctgagtccagctggcggtagcggcggggttcgggcagagggcagaggctcactgctcacgtgtggtgatgtagaagagaatccaggtcctaggaggcgagcacggatgttcgtatttctggtgctgctgcccctagtgagctccagggtgtcgcccacccaggaggtagtgaggttccctaacataactaaccggtgcccctttgataaagtttttaacgccactagattcccaaatgtgtatgcatgggagagaactaaaatttcagactgcgtcgctgactacaccgtgttgtataatagtaccagtttcagtacattcaagtgttacggcgtgtccccttccaaactcatcgacctttgcttcaccagcgtctacgcggatacttttcttattagatcttcggaggtccgccaggtagcaccaggggaaacaggagtaatagctgattataactacaaactaccagacgatttcacaggttgcgtgatcgcctggaacacagctaagcaggacacgggaaattactactataggagccataggaagaccaagctcaagccttttgagagagatctgtcttctgacgacggaaatggcgtttatacactgtcaacctacgacttcaatcctaatgtgcccgttgcctaccaggccaccagagtcgtggtgctgagcttcgagctgctgaacgcccctgctacagtctgcggccctaagctgagcacacagctggtgaagaatcagtgtgtgaattttggaggtagcggcggttctggaggggggtctggaggcataaaggaagagattgccaagattaaggaagaacaggcaaagataaaagaaaagattgcagagattgaaaaaaggattgctgagatcgagaaaaggatagcaggaggttgttgcggcggtagcggcggtgtccgtgctgaaggacgcgggtcccttctcacctgcggcgacgttgaggaaaaccctggccctagaaggcgagcacggatgttcgtgttcctggtgcttctccctctggtgtctagccgtgtggcccccagcaaggaagtcgtgcgcttccccaacatcacaaatctctgtccttttggagaggtcttcaatgcaaccacattcccttccgtgtacgcctgggagagaaaacggatttccaactgcgtggctgactacagcgtgctttataattctaccagtttctctaccttcaaatgctacggcgtgtctgccacaaaactaaatgatctgtgcttcagcaatgtgtatgccgacagctttgttgtgaagggagatgatgtgcggcagattgcacccggccagaccggggttatcgccgactacaactataagctgcccgatgacttcatgggctgcgtgctcgcttggaacacaagaaacattgatgccacctcaaccggaaactacaattacaaatatcgaagcttgcggcacgggaaactgaggccatttgaaagggacatcagcaacgtgcccttctcaccggatggaaagccatgcaccccccctgcctttaattgctactggcccctgaacgactatggcttcttcacaaccaatggcattggatatcagccctacagagtggtggtgctgagttttgagctgctgaacgctcccgctacagtgtgcggacccaagctcagcacagacctgatcaagaaccagtgtgtgaacttcggaggtagcggcggttctggaagaatgaaacagattgaggataaaattgaagagatattgtcaaagatctatcacatagagaacgaaatcgcccgaataaagaagctgattggggaacgctagtga

SEQ ID NO: 28035 - DNA, 2589 bp, synthetic construct
  source 1..2589: mol_type = other DNA
gccaccatgtttgtcttcctggtcttgctgccgctggtgagcagccgtgtgtctcccacccaggaagtgattagatttccaaatatcaccaaccgctgccctttcgatagggtgtttaacgcctccaggttcccaagcgtctacgcctgggagagaaccaagatcagcgaatgtgtcgccgactacacagtgctgtataattcaacctctttttccacattcaagtgctatggagtgtcaccatctaaactcatcgacttatgttttaccagcgtgtatgcagacaccttcttgatcaggtccagcgaggtcagacaggtggcacctggcgaaaccggcgtcattgctgactacaattacaagctgcctgatgattttaccggttgcgttattgcctggaacacagcaaaacaggataccggaaattactattatcgttcccaccggaagactaagctgaaacccttcgagcgagatctttcgtcagacgacggaaatggggtgtacacactttccacgtacgacttcaatcctaatgtgccagtggcctaccaggccaccagagtcgtggtgctctcatttgagctgctgaatgcccctgctacagtctgtggccccaaactgtccactcaactggtgaagaaccagtgtgtgaacttcggaggtagcggcggttctggaggctacattccagaagctccacgcgatggccaggcttatgtgcggaaagatggcgagtgggtgtttctcagcacctttctgagtccagctggcggtagcggcggggttcgggcagagggcagaggctcactgctcacgtgtggtgatgtagaagagaatccaggtcctaggaggcgagcacggatgttcgtatttctggtgctgctgcccctagtgagctcccgagtttcccccagcaccgaggtcatcaggttccctaacatcaccaacaggtgcccttttgacagagtcttcaacgcgtctcgatttccgtccgtgtacgcctgggagcggacaaagattagcgattgtgtggccgactacactgtcctctacaattcgaccagctttagtaccttcaagtgctatggggtctcaccatccaaactaattgatctgtgtttcacttctgtttatgcggatacttttctcataagattttcggaagtacgacagatcgccccaggcgaaacgggagtgatcgctgactacaactataaactgcccgacgaattcacaggatgcgtgatagcttggaatactgccaaccaagacagggggcagtattactaccggtcctcacgaaaaacgaagttgaagcccttcgagagagatttgtctagcgacgaaaatggcgttagaacactttcaacctatgacttttaccctagtgtgccacttgagtatcaggctacccgcgtggtggtcctgagcttcgagttactgaatgcacctgccacagtatgtggtccgaagctgtctaccagcctcattaaaaatcagtgcgtgaatttcggaggtagcggcggttctggaggggggtctggaggcataaaggaagagattgccaagattaaggaagaacaggcaaagataaaagaaaagattgcagagattgaaaaaaggattgctgagatcgagaaaaggatagcaggaggttgttgcggcggtagcggcggtgtccgtgctgaaggacgcgggtcccttctcacctgcggcgacgttgaggaaaaccctggccctagaaggcgagcacggatgttcgtgttcctggtgcttctccctctggtgtctagcagggtagtgcccagtggagacgtggtccggttccctaacatcaccaacctgtgtcccttcggggaggtgttcaatgccaccaagttccccagtgtttatgcatgggagaggaagaagatctccaactgtgtggctgattactctgtcctgtacaacagcaccttcttctccacatttaaatgttatggcgtttctgctaccaagctgaatgacctctgcttctctaacgtgtatgctgacagttttgtggtgaagggagatgatgttagacagattgctcctgggcagaccggcgtcattgcagattataattataaactcccagatgacttcatgggctgcgtgctcgcctggaataccagaaatatcgacgctacttcaaccggaaactacaattacaagtaccggtacctgagacacgggaaactgagaccattcgagcgggacattagcaatgtgcctttcagccccgatggaaagccctgcactcctcctgccctgaactgctactggcccctcaatgattacggcttctacaccaccactggaattggctaccagccctacagagtggttgtgctgtcatttgagctgctgaacgccccagccacagtctgtggccccaaactatccactgacctgattaagaaccagtgcgtgaacttcggaggtagcggcggttctggaagaatgaaacagattgaggataaaattgaagagatattgtcaaagatctatcacatagagaacgaaatcgcccgaataaagaagctgattggggaacgctagtga

SEQ ID NO: 28036 - protein, 1036 aa, synthetic construct
MAGYGDAVVYRGTTTYKLNVGDYFVLTSHIKWDLLKYDFTEERLKLFDLWVYKQFDTYNLWNTFTTSRYWEPEFYEAMYTPHRDAAMQRKLEKMADQAMTQMYKQARSEDKALLEDEFTPFDVVRQCSGVTVAGVSICSTMTNRQFHQKLLKSIAATRGATVVIGTSKFYGGWHNMLGVSFSTFEEAALCTFLLNKEMYLKLRSDKFPVLHDIGNPKAIKCVPTANPKTPKYKFVRIQPGQTFSVLAGTGTSTDVVYRAFDIYNCVSFCYMHHMELPTGVHAGTDLWPQIAQFAPSASAFFGMSRIGMECINANQVIVNNLDKSAGFPFNKWGKARLYYMFYKGVITHDVSSAINRPQIGVFVNEFYAYLRKHFSMMILSDDATCRRCPAEIVDTVSALVYDNKLSPNLAWPLIVTALRANSNKTVGELGDVRETMSYLFLYCQVHGNAHVASCDAIMTRCLAVDMTYRRLISMMGFKMNYQVNGFTQTTETAHSCNVNRFNVAITRAKVGMKDLSPRWYFYYLGTGPTDGTLMIERFVSLAIDAYPLTKHPNQEYADVFHLYLQYIRKLHDELTGHMLDMYSNVLFSTVFPPTSFGPLVRKIFVDGVPFVVSTGYHFRELGVPLLESELVIGAVILRGHNNYMLTYNKVENMTPRDLGACIDCGTTFTYASALWEIQQVVDADSKIWAQCVQLHNDILLAKDTTPGTGKSHFAIGLALYYPSARIVYTACSHAAVDALCEKALTMLVKQGDDYVYLPYPDPSRILGAGCFAAYSRYRIGNYKLNTDHNLHSSRLSFKELLVYAADPAMHAASGNLLLDKRTPRTLLTKGTLEPEYFNSVCRLMVKYLYFIKGLNNLNRGMVLGSLAISMATNYDLSVVNARLRAKTLKNLSDRVVFVLWAHGFELTSMKYFVKIGPERAVSKGFFKEGSSVELKHFFFAQDGNAAISDYDYYRYNLPTMCDIRQLLFVVEVVDKYCDGGSLYVNKHAFHTPAGPGPGAKFVAAWTLKAAAGPGPGQYIKANSKFIGITELGPGPG

SEQ ID NO: 28037 - DNA, 2970 bp, synthetic construct
  source 1..2970: mol_type = other DNA
tacggggacgccgtggtctataggggcaccaccacttacaaactgaatgtgggagactatttcgtgctgactagccacatcaaatgggatctgcttaagtacgactttaccgaggagcgcctgaagctgttcgacctctgggtgtataagcagttcgatacatacaatctctggaatacattcactacatctcgctactgggagcctgagttctacgaggctatgtacacccctcacagagacgctgctatgcaacgcaagctagagaagatggccgaccaggcaatgacccagatgtacaagcaggctcggagcgaggacaaggccctgcttgaggacgagtttacaccttttgatgtggtgcggcagtgtagcggcgtgacagtggcaggcgtgtcaatttgtagcaccatgaccaacagacagttccaccagaagctgctgaaaagcatcgcagctacaaggggcgccaccgttgttattggcacatccaaattctacggaggctggcacaatatgctcggcgttagcttttcaacctttgaggaggccgccttgtgtactttccttctcaataaggagatgtatttgaaactcaggtctgataaattcccagtgctgcacgacataggaaatcctaaagctatcaagtgcgtacctactgctaaccccaagacccctaaatataagttcgtgaggatccagcctggtcagacatttagcgtcctcgctggtacaggtactagcaccgatgttgtctacagagccttcgacatctacaattgcgtgagcttttgttatatgcaccacatggagctcccaactggagtgcatgccggcaccgacctgtggccccagatcgcacagtttgcaccttcagcttccgcatttttcggaatgagccgcatcggcatggaatgtattaatgccaaccaggtcattgtcaataacctcgataagtctgccggattccccttcaataaatggggaaaggcccgcctgtattatatgttctataagggggtcattactcatgatgtcagctccgctattaataggcctcagatcggcgtgttcgtcaacgaattttatgcttaccttaggaaacacttcagtatgatgatcctcagcgacgatgcaacatgccgcagatgccccgccgaaattgtcgacacagtcagcgctctcgtctacgacaacaagctgtcccccaacctcgcctggcccctcatcgtgaccgccctgagggccaacagcaacaagactgtgggggaactgggcgacgtgagagagaccatgagctacttatttctgtactgtcaggtgcacggcaatgcccacgtggctagctgcgacgccattatgacacggtgcctggctgtggacatgacttacagacggctcatctctatgatgggatttaagatgaactaccaggtgaatgggttcacacaaacaacagaaacagcccatagctgtaatgtcaatcggtttaacgttgcaatcactcgcgccaaagtgggaatgaaagatctttccccaaggtggtatttctattacctgggaaccggccctaccgatggaacgttgatgattgaaaggtttgtgtccctagccattgatgcctatccgctgaccaagcacccaaatcaggaatacgctgacgttttccacctctatctccagtacatcagaaaattgcacgatgagctcaccgggcatatgcttgacatgtatagcaacgttctgtttagtacagtttttcctcccaccagcttcgggcccctggtgagaaaaatctttgtcgatggcgttccttttgtggtgagcacgggctatcatttccgggaattaggcgtccctctgctggagtccgagctggtgatcggagccgtgatcctgagaggccacaacaattacatgctgacctacaacaaagttgagaacatgacaccacgggaccttggagcatgtattgactgcggaactacgtttacttatgcctctgcactttgggaaattcagcaggttgtggatgccgattctaaaatctgggcccagtgtgtgcagctgcacaatgatattcttctggccaaggatacaactcctgggactggaaagtcccactttgccatcgggctggccctgtactatccatcagcacggattgtgtatactgcctgctctcacgccgcagtggacgccctgtgtgaaaaggcactgaccatgctcgtgaaacagggagatgactatgtgtatctgccatacccagacccttctcggatcttgggcgctggatgttttgcagcctacagtcggtatagaattggcaattataagctgaataccgatcacaaccttcatagctccaggctgtcatttaaggaactgctggtctacgccgccgacccagcaatgcacgctgcctccggcaacctcctccttgacaagagaactcctaggactctgctcaccaagggcaccctggagccagagtacttcaactctgtgtgtcgccttatggtgaagtatctctacttcattaagggcctgaacaatcttaaccgcggaatggtgctgggctccctggccattagtatggccaccaattatgatctctcagtggtgaacgccagactgagagctaagaccctgaagaacttgagcgatagagtggtgtttgtgctgtgggctcatggatttgaattgaccagcatgaaatacttcgtgaagatcgggccagagagggccgtgtctaaaggcttcttcaaagagggaagcagcgtagaactgaaacatttcttctttgctcaggacggaaacgcggctattagcgactacgactactacagatataatctgcccacaatgtgcgatatccggcagctcctgtttgtagtggaggtggtggataaatactgtgacggcggatccctgtatgtgaataagcacgccttccacactccagcc

SEQ ID NO: 28038 - protein, 827 aa, synthetic construct
MAGYGDAVVYRGTTTYKLNVGDYFVLTSHKHFFFAQDGNAAISDYDYYRYNLPTWPQIAQFAPSASAFFGMSRIGMECINANQVIVNNLDKSAGFPFNKWGKARLYYTSRYWEPEFYEAMYTPHRDAAMQRKLEKMADQAMTQMYKQARSEDKPGTGKSHFAIGLALYYPSARIVYTACSHAAVDALCEKALTMLVKQGDDYVYLPYPDPSRILGAGCFGTTFTYASALWEIQQVVDADSKIFTQTTETAHSCNVNRFNVAITRAKVGMKDLSPRWYFYYLGTGPTDGTLMIERFVSLAIDAYPLTKHPNQEYADVFHLYLQYIRKLHDELTGHMLDMYSNVLFSTVFPPTSFGPLVRKIFVDGVPFVVSTGYHFRELGVPLLESELVIGAVILRGHNNYMLTYNKVENMTPRDLGACIDCSDRVVFVLWAHGFELTSMKYFVKIGPERFVNEFYAYLRKHFSMMILSDDATCRRCPAEIVDTVSALVYDNKLSPNLAWPLIVTALRANSNKTVGELGDVRETMSYLFLWVYKQFDTYNLWNTFTALLEDEFTPFDVVRQCSGVTVAGVSICSTMTNRQFHQKLLKSIAATRGATVVIGTSKFYGGWHNMLAAYSRYRIGNYKLNTDHNLHSSRLSFKELLVYAADPAMHAASGNLLLDKRTLYCQVHGNAHVASCDAIMTRCLAVDMTYRRLISMMGFKMNYQVNGDKFPVLHDIGNPKAIKCVPTANPKTPKYKFVRIQPGQTFSVLAGTGTSTDVVYRAFDIYNCDGGSLYVNKHAFHTPAGPGPGAKFVAAWTLKAAAGPGPGQYIKANSKFIGITELGPGPG

SEQ ID NO: 28039 - DNA, 2343 bp, synthetic construct
  source 1..2343: mol_type = other DNA
tatggagatgcagttgtgtacagaggcaccaccacatacaaactcaatgtgggggattatttcgtgctgacctcccacaagcactttttctttgcacaggacggaaatgccgctatctccgactatgattactaccggtacaatttacccacctggcctcagattgcccagtttgccccaagcgccagcgccttcttcggcatgagcaggatcgggatggagtgtattaatgctaaccaagtcattgtgaacaatttggacaagtcagccggattcccattcaacaaatggggcaaagctcggttatattacacatctcgctactgggaaccagagttctatgaggcaatgtatactccacatagggatgctgccatgcagagaaagcttgagaagatggcggatcaggccatgacccagatgtataaacaggccagaagcgaagataaacctggcactggcaagagtcacttcgccatcggactggccctctactaccctagcgctagaattgtttataccgcttgttctcacgcagccgtggatgccctgtgtgagaaggccctgactatgctggtgaaacaaggggacgattacgtgtacctgccttaccccgacccatccaggatcctgggagccggctgcttcggaaccaccttcacctatgcttccgccttgtgggagattcagcaggtggtggacgccgactctaagattttcactcagaccactgaaacagctcactcttgcaacgtcaatcgctttaacgttgcaataaccagggccaaggtaggaatgaaggatctatcaccccggtggtatttttactatctggggacaggccccacagacggaacactgatgatagaaagattcgtgtccctggccattgacgcctaccctctgactaagcaccctaatcaggaatatgctgatgtgttccatttgtaccttcaatacatccggaagctgcacgacgagctgactggacacatgctcgacatgtacagtaacgttctcttcagcacagtcttcccacccacatcttttggacctctggtgcgcaagatctttgtcgatggggtccctttcgtggttagcactggataccacttccgggaattgggggtgccactgctggagagcgagcttgttatcggggccgtgattctgcgcggacacaataactacatgctgacttacaataaagtggagaacatgacacctcgggatctgggcgcatgtatcgactgctcagatcgagtggtctttgtgttatgggcccacggctttgaactgacaagcatgaaatactttgtgaaaatcgggcctgaacggttcgtgaacgaattctacgcatatctgagaaaacacttctctatgatgatcctgagcgatgacgccacctgcaggcggtgtccagctgagattgtggacaccgtgtccgcactggtgtacgataacaagctgagtcccaacctagcctggcccctgattgtgacagccctcagggctaattcaaataaaactgtgggcgagctcggcgacgtgagagagaccatgtcctacctgttcctgtgggtgtacaagcaattcgatacctacaacctgtggaatacatttaccgctctgctcgaggatgagttcactccctttgatgttgtgagacagtgttctggcgtgactgtggcaggagtgagcatctgtagcacaatgaccaatcggcagttccaccagaagttattgaagtccatcgccgccactaggggagccaccgtggtgatcggaacatcaaagttttatggaggctggcacaacatgcttgccgcctacagtagatatcgtattggcaactataaactgaacacagatcacaatctgcactcgagcagactgtcttttaaggagctgctcgtctatgccgccgatcccgcaatgcacgccgcaagtggtaatctgctcctggataaaagaaccctgtactgtcaggttcatggcaacgctcacgtggcatcctgtgatgccatcatgactaggtgtctggccgttgacatgacctatagacgcctgatcagcatgatgggatttaagatgaactaccaggtgaacggcgacaagttccctgtcctgcatgatatcggtaacccaaaggccatcaaatgtgtgcctaccgccaaccccaagacacctaagtataagtttgtaaggatccagcctggtcaaacttttagtgttttagccgggaccggcaccagtactgatgtagtgtatagggcttttgacatctataactgtgacggaggtagcctctatgtgaataaacatgcctttcatacaccagcc

SEQ ID NO: 28040 - protein, 644 aa, synthetic construct
MAGYGDAVVYRGTTTYKLNVGDYFVLTSHMKDLSPRWYFYYLGTGPTDGTLMIERFVSLAIDAYPLTKHPNQEYADVFHLYLQYIRKLHDELTGHMLDMYSFYAYLRKHFSMMILSDDLWVYKQFDTYNLWNTFTMQRKLEKMADQAMTQMYKQARSEDKPGTGKSHFAIGLALYYPSARIVYTACSHATSRYWEPEFYEAMYTPHCINANQVIVNNLDKSAGFPFNKWGKARLYYALLEDEFTPFDVVRQCSGVTVAGVSICSTMTNRQFHQKLLKSIAATRGATVVIGTSKFYGGWHNMLTMLVKQGDDYVYLPYPDPSRILGAGCFAAYSRYRIGNYKLNTDHNLHSSRLSFKELLVYAADPAMHAASGNLLLDKRTVRKIFVDGVPFVVSTGYHFRELGVPLLESELVIGAVILRGHNNYMLTYNKVENMTPRDLGACIDCSDRVVFVLWAHGFELTSMKYFVKIGPERKHFFFAQDGNAAISDYDYYRYNLPTWPQIAQFAPSASAFFGMSRIGMETCRRCPAEIVDTVSALVYDNKLTANPKTPKYKFVRIQPGQTFSVLAGTGTSTDVVYRAFDIYNCDGGSLYVNKHAFHTPAGPGPGAKFVAAWTLKAAAGPGPGQYIKANSKFIGITELGPGPG

SEQ ID NO: 28041 - DNA, 1794 bp, synthetic construct
  source 1..1794: mol_type = other DNA
tacggcgatgccgtcgtgtatagaggaacaaccacctataagcttaatgtgggagattatttcgtgcttactagtcatatgaaggacctgtctcctaggtggtacttctattacctgggcaccggcccaactgacggcaccctgatgatcgagaggtttgtgagcctggccattgatgcttatccactcaccaagcaccccaaccaggagtatgccgatgttttccacctctacctgcagtacattagaaagctccatgatgagttaacaggccacatgcttgacatgtatagcttttatgcctatctgagaaagcactttagtatgatgattctgagtgatgacctctgggtgtataaacagttcgacacctacaatctgtggaacaccttcactatgcagagaaaactggagaagatggccgatcaggctatgactcagatgtacaagcaggcccggtctgaggacaagccagggacaggcaaaagccactttgcaatagggttggccttgtactatcctagtgccagaatcgtgtacaccgcctgctcccatgctacctcaaggtattgggagcccgagttctacgaggcaatgtatacccctcattgtatcaatgcaaatcaggttatcgtaaacaatctcgataagagcgcaggcttcccctttaacaaatgggggaaggctcggctgtactacgcactcctggaagacgagtttacaccttttgacgtggtgagacagtgcagcggggtgacagttgccggcgtgtctatctgcagcaccatgactaataggcagtttcatcagaagcttctgaaatctatcgccgccaccagaggtgccactgtggtgatcggtacctctaagttttacggcggctggcataatatgcttacaatgctggtgaagcagggggacgattacgtgtatctgccttacccagacccttctcgtattctgggagctggctgcttcgctgcatattccagataccgcattggcaattacaagctgaacacagatcataatctgcactcttcaagattgtccttcaaggaacttctggtgtatgctgcagatcccgccatgcacgctgcctccgggaacctgctgctggacaagagaactgtgaggaagatttttgtcgatggagtgccattcgtggtgtccactggataccatttcagagagctcggcgtgcctcttctggagtccgagctggttattggcgccgtgatccttcggggccacaataactacatgctgacatacaataaagtggagaacatgacacctcgggacttaggcgcttgtattgactgcagcgaccgggtggtgtttgtgctgtgggcacacggcttcgagctgaccagcatgaaatattttgtgaagatcggacccgagaggaaacatttcttcttcgcccaggacggcaatgccgccatctccgactatgattattaccggtacaacctccccacctggcctcagattgcccagttcgccccttctgccagcgctttcttcggcatgagccggattggcatggagacatgcaggagatgtcctgcagaaatcgtggatacagtgtctgccctggtctatgataacaagctcactgccaacccaaagacccccaaatacaagttcgtgaggatccagcccggccagacattttctgtgctggccggaactgggacatccaccgatgtggtgtaccgcgcatttgatatctataattgtgacggaggcagcctgtatgtgaataagcacgccttccacacacctgcc

SEQ ID NO: 28042 - protein, 431 aa, synthetic construct
MAGWPQIAQFAPSASAFFGMSRIGMEDAYPLTKHPNQEYADVFHLYLQYIRKLHDELTGHMLDMYSFYAYLRKHFSMMILSDDPGTGKSHFAIGLALYYPSARIVYTACSHATSRYWEPEFYEAMYTPHCDGGSLYVNKHAFHTPANNLDKSAGFPFNKWGKARTYNKVENMTPRDLGACIVAGVSICSTMTNRQFHQKLLKSIAATRGATVVIGTSKFYGGWHNMLTMLVKQGDDYVYLPYPDPSRILGAGCFAAYSRYRIGNYKLNTDHNLHSSRLSFKELLVYAADPAMHAASGNLLLDKRTVRKIFVDGVPFVVSTGYHFRELGVPLLESELVIGAVILRGHKHFFFAQDGNAAISDYDYYRYNLPTMKDLSPRWYFYYLGTGPGPGPGAKFVAAWTLKAAAGPGPGQYIKANSKFIGITELGPGPG

SEQ ID NO: 28043 - DNA, 1155 bp, synthetic construct
  source 1..1155: mol_type = other DNA
tggcctcagatcgcacagtttgctccttctgccagcgccttctttggcatgtccaggataggaatggaagatgcctatccactgaccaagcaccctaaccaggaatatgcagatgtcttccatctctacctgcagtacatcagaaaactgcatgacgagctgacaggacacatgttagacatgtactcattttacgcctatctcaggaaacatttttccatgatgatcctgtctgacgaccccggcacaggaaagagccatttcgctattggcctggctctgtactaccccagcgctagaatcgtgtacacagcctgctcccacgccactagccggtattgggagccagagttctatgaggccatgtatacacctcactgcgatggaggaagtctgtatgttaacaagcatgccttccacacacctgccaataatctggataagtccgctggatttccctttaataagtggggcaaagctagaacttacaataaagtggaaaacatgacacccagggacttaggcgcctgcatcgtggccggcgtgagcatctgctcaaccatgacaaatagacagttccaccagaagttgttgaaatctatcgccgcaaccaggggggccaccgtggtgatcggcacctctaagttttatggcggctggcacaacatgctgaccatgcttgtgaagcagggagatgattacgtgtacctgccctacccagatcctagcagaatcctgggcgccggctgctttgccgcttactctaggtacagaatcggcaactacaagctgaatacagatcacaatctccactcatctagactgtcctttaaggagctgctggtgtacgccgctgatccagccatgcacgccgccagcgggaatctcctgcttgataaaaggacagtgagaaagatctttgtggatggcgtgcctttcgtggtgtccacaggctatcactttagggagctgggagttcctctgctggagagcgagctggtcatcggcgccgtgattctgagaggccacaaacactttttcttcgcccaggatggaaatgccgccatctccgattacgattattatagatacaacctgcctacaatgaaggacctgagccccagatggtacttctactacctgggcaccggccct
